(19) United States
(12) Patent Application Publication
(10) Pub. No.: US 2012/0014957 A1
(43) Pub. Date: Jan. 19, 2012

(54) DUAL VARIABLE DOMAIN IMMUNOGLOBULINS AND USES THEREOF

(75) Inventors: Tariq Ghayur, Holliston, MA (US); Junjian Liu, Shrewsbury, MA (US)

(73) Assignee: Abbott Laboratories

(21) Appl. No.: 13/178,641

(22) Filed: Jul. 8, 2011

Related U.S. Application Data
(60) Provisional application No. 61/363,120, filed on Jul. 9, 2010.

(51) Int. Cl. A61K 39/395; C07K 19/00; C12N 11/02; C12N 15/62; C12N 15/63; C12N 1/19; C12N 5/10; A61P 35/00; C12N 5/16; G01N 33/53; C12N 1/21; C07K 16/46; C12P 21/08

(52) U.S. Cl. 424/136.1; 530/387.3; 530/391.3; 530/391.7; 435/177; 536/23.4; 435/320.1; 435/69.6; 435/328; 435/7.2; 435/7.92; 435/252.33; 435/254.21

(57) ABSTRACT

Engineered multivalent and multispecific binding proteins, methods of making, and specifically to their uses in the prevention, diagnosis, and/or treatment of disease are provided.

### CROSS REFERENCE TO RELATED APPLICATIONS

[0001] This application is a non-provisional application claiming priority to U.S. Provisional Application Ser. No. 61/363,120, filed Jul. 9, 2010, the contents of which are hereby incorporated by reference.

### FIELD

[0002] Multivalent and multispecific binding proteins, methods of making, and specifically to their uses in the, diagnosis, prevention and/or treatment of acute and chronic inflammatory diseases, cancer, and other diseases are provided.

### BACKGROUND

[0003] Engineered proteins, such as multispecific antibodies capable of binding two or more antigens are known in the art. Such multispecific binding proteins can be generated using cell fusion, chemical conjugation, or recombinant DNA techniques.

[0004] Bispecific antibodies have been produced using quadroma technology (see Milstein, C. and A. C. Cuello (1983) Nature 305(5934):537-40) based on the somatic fusion of two different hybridoma cell lines expressing murine monoclonal antibodies (mAbs) with the desired specificities of the bispecific antibody. Because of the random pairing of two different immunoglobulin (Ig) heavy and light chains within the resulting hybrid-hybridoma (or quadroma) cell line, up to ten different Ig species are generated, of which only one is the functional bispecific antibody. The presence of mis-paired by-products, and significantly reduced production yields, means sophisticated purification procedures are required.

[0005] Bispecific antibodies can also be produced by chemical conjugation of two different mAbs (see Staerz, U. D., et al. (1985) Nature 314(6012): 628-31). This approach does not yield homogeneous preparation. Other approaches have used chemical conjugation of two different mAbs or smaller antibody fragments (see Brennan, M., et al. (1985) Science 229(4708): 81-3).

[0006] Another method used to produce bispecific antibodies is the coupling of two parental antibodies with a hetero-bifunctional crosslinker, but the resulting bispecific antibodies suffer from significant molecular heterogeneity because reaction of the crosslinker with the parental antibodies is not site-directed. To obtain more homogeneous preparations of bispecific antibodies two different Fab fragments have been chemically crosslinked at their hinge cysteine residues in a site-directed manner (see Glennie, M. J., et al. (1987) J. Immunol. 139(7): 2367-75). But this method results in Fab′2 fragments, not full IgG molecule.

[0007] A wide variety of other recombinant bispecific antibody formats have been developed (see Kriangkum, J., et al. (2001) Biomol. Eng. 18(2): 31-40). Amongst them tandem single-chain Fv molecules and diabodies, and various derivatives thereof, are the most widely used. Routinely, construction of these molecules starts from two single-chain Fv (scFv) fragments that recognize different antigens (see Economides, A. N., et al. (2003) Nat. Med. 9(1): 47-52). Tandem scFv molecules (taFv) represent a straightforward format simply connecting the two scFv molecules with an additional peptide linker. The two scFv fragments present in these tandem scFv molecules form separate folding entities. Various linkers can be used to connect the two scFv fragments and linkers with a length of up to 63 residues (see Nakanishi, K., et al. (2001) Ann. Rev. Immunol 19: 423-74). Although the parental scFv fragments can normally be expressed in soluble form in bacteria, it is, however, often observed that tandem scFv molecules form insoluble aggregates in bacteria. Hence, refolding protocols or the use of mammalian expression systems are routinely applied to produce soluble tandem scFv molecules. In a recent study, in vivo expression by transgenic rabbits and cattle of a tandem scFv directed against CD28 and a melanoma-associated proteoglycan was reported (see Gracie, J. A., et al. (1999) J. Clin. Invest. 104(10): 1393-401). In this construct, the two scFv molecules were connected by a CH1 linker and serum concentrations of up to 100 mg/L of the bispecific antibody were found. Various strategies including variations of the domain order or using middle linkers with varying length or flexibility were employed to allow soluble expression in bacteria. A few studies have now reported expression of soluble tandem scFv molecules in bacteria (see Leung, B. P., et al. (2000) J. Immunol. 164(12): 6495-502; Ito, A., et al. (2003) J. Immunol. 170(9): 4802-9; Kann, A., et al. (2002) J. Neuroimmunol. 125(1-2): 134-40) using either a very short Ala3 linker or long glycine/serine-rich linkers. In another recent study, phage display of a tandem scFv repertoire containing randomized middle linkers with a length of 3 or 6 residues was employed to enrich for those molecules that are produced in soluble and active form in bacteria. This approach resulted in the isolation of a tandem scFv molecule with a 6 amino acid residue linker (see Arndt, M. and J. Krauss (2003) Methods Mol. Biol. 207: 305-21). It is unclear whether this linker sequence represents a general solution to the soluble expression of tandem scFv molecules. Nevertheless, this study demonstrated that phage display of tandem scFv molecules in combination with directed mutagenesis is a powerful tool to enrich for these molecules, which can be expressed in bacteria in an active form.

[0008] Bispecific diabodies (Db) utilize the diabody format for expression. Diabodies are produced from scFv fragments by reducing the length of the linker connecting the VH and VL domain to approximately 5 residues (see Peipp, M. and T. Valerius (2002) Biochem. Soc. Trans. 30(4): 507-11). This reduction of linker size facilitates dimerization of two polypeptide chains by crossover pairing of the VH and VL domains. Bispecific diabodies are produced by expressing, two polypeptide chains with, either the structure VHA-VLB and VHB-VLA (VH-VL configuration), or VLA-VHEB and VLB-VHA (VL-VH configuration) within the same cell. A large variety of different bispecific diabodies have been produced in the past and most of them are expressed in soluble form in bacteria. However, a recent comparative study demonstrates that the orientation of the variable domains can influence expression and formation of active binding sites (see Mack, M. et al. (1995) Proc. Natl. Acad. Sci. USA 92(15): 7021-5). Nevertheless, soluble expression in bacteria represents an important advantage over tandem scFv molecules. However, since two different polypeptide chains are expressed within a single cell inactive homodimers can be produced together with active heterodimers. This necessitates the implementation of additional purification steps in order to obtain homogenous preparations of bispecific diabodies. One approach to force the generation of bispecific diabodies is the production of knob-into-hole diabodies (see Holliger, P., T. Prospero, and G. Winter (1993) Proc. Natl. Acad. Sci. USA 90(14): 6444-8.18). This approach was demonstrated for a bispecific diabody directed against HER2 and CD3. A large knob was introduced in the VH domain by exchanging Va137 with Phe and Leu45 with Trp and a complementary hole was produced in the VL domain by mutating Phe98 to Met and Tyr87 to Ala, either in the anti-HER2 or the anti-CD3 variable domains. By using this approach the production of bispecific diabodies could be increased from 72% by the parental diabody to over 90% by the knob-into-hole diabody. Importantly, production yields only slightly decrease as a result of these mutations. However, a reduction in antigen-binding activity was observed for several constructs. Thus, this rather elaborate approach requires the analysis of various constructs in order to identify those mutations that produce heterodimeric molecule with unaltered binding activity. In addition, such approach requires mutational modification of the immunoglobulin sequence at the constant region, thus creating non-native and non-natural form of the antibody sequence, which may result in increased immunogenicity, poor in vivo stability, as well as undesirable pharmacokinetics.

[0009] Single-chain diabodies (scDb) represent an alternative strategy for improving the formation of bispecific diabody-like molecules (see Holliger, P. and G. Winter (1997) Cancer Immunol Immunother. 45(3-4): 128-30; Wu, A. M., et al. (1996) Immunotechnology 2(1): p. 21-36). Bispecific single-chain diabodies are produced by connecting the two diabody-forming polypeptide chains with an additional middle linker with a length of approximately 15 amino acid residues. Consequently, all molecules with a molecular weight corresponding to monomeric single-chain diabodies (50-60 kDa) are bispecific. Several studies have demonstrated that bispecific single chain diabodies are expressed in bacteria in soluble and active form with the majority of purified molecules present as monomers (see Holliger, P. and G. Winter (1997) Cancer Immunol Immunother. 45(3-4): 128-30; Wu, A. M., et al. (1996) Immunotechnol. 2(1): 21-36; Pluckthun, A. and P. Pack (1997) Immunotechnol. 3(2): 83-105; Ridgway, J. B., et al. (1996) Protein Engin. 9(7): 617-21). Thus, single-chain diabodies combine the advantages of tandem scFvs (all monomers are bispecific) and diabodies (soluble expression in bacteria).

[0010] More recently diabodies have been fused to Fc to generate more Ig-like molecules, named di-diabodies (see Lu, D., et al. (2004) J. Biol. Chem. 279(4): 2856-65). In addition, multivalent antibody construct comprising two Fab repeats in the heavy chain of an IgG and capable of binding four antigen molecules has been described (see WO 0177342A1, and Miller, K., et al. (2003) J. Immunol. 170(9): 4854-61).

[0011] There is a need in the art for improved multivalent binding proteins capable of binding two or more antigens. U.S. patent application Ser. No. 11/507,050 provides a novel family of binding proteins capable of binding two or more antigens with high affinity, which are called dual variable domain immunoglobulins (DVD-Ig™). Further, novel binding proteins capable of binding two or more antigens are provided.

### SUMMARY

[0012] Multivalent binding proteins capable of binding two or more antigens are provided. A novel family of binding proteins capable of binding two or more antigens with high affinity are provided.

[0013] In one embodiment, a binding protein comprising a polypeptide chain, wherein the polypeptide chain comprises VD1-(X1)n-VD2-C-(X2)n, wherein VD1 is a first variable domain, VD2 is a second variable domain, C is a constant domain, X1 represents an amino acid or polypeptide, X2 represents an Fc region and n is 0 or 1 is provided. In an embodiment the VD1 and VD2 in the binding protein are heavy chain variable domains. In another embodiment, the heavy chain variable domain is a murine heavy chain variable domain, a human heavy chain variable domain, a CDR grafted heavy chain variable domain, or a humanized heavy chain variable domain. In yet another, embodiment VD1 and VD2 are capable of binding the same antigen. In another embodiment VD1 and VD2 are capable of binding different antigens. In still another embodiment, C is a heavy chain constant domain. For example, X1 is a linker with the proviso that X1 is not CH1. For example, X1 is a linker comprising AKTTPKLEEGEFSEAR (SEQ ID NO: 1); AKTTPKLEEGEFSEARV (SEQ ID NO: 2); AKTTPKLGG (SEQ ID NO: 3); SAKTTPKLGG (SEQ ID NO: 4); SAKTTP (SEQ ID NO: 5); RADAAP (SEQ ID NO: 6); RADAAPTVS (SEQ ID NO: 7); RADAAAAGGPGS (SEQ ID NO: 8); RADAAAA(G₄S)₄ (SEQ ID NO: 9); SAKTTPKLEEGEFSEARV (SEQ ID NO: 10); ADAAP (SEQ ID NO: 11); ADAAPTVSIFPP (SEQ ID NO: 12); TVAAP (SEQ ID NO: 13); TVAAPSVFIFPP (SEQ ID NO: 14); QPKAAP (SEQ ID NO: 15); QPKAAPSVTLFPP (SEQ ID NO: 16); AKTTPP (SEQ ID NO: 17); AKTTPPSVTPLAP (SEQ ID NO: 18); AKTTAP (SEQ ID NO: 19); AKTTAPSVYPLAP (SEQ ID NO: 20); ASTKGP (SEQ ID NO: 21); ASTKGPSVFPLAP (SEQ ID NO: 22), GGGGSGGGGSGGGGS (SEQ ID NO: 23); GENKVEYAPALMALS (SEQ ID NO: 24); GPAKELTPLKEAKVS (SEQ ID NO: 25); or GHEAAAVMQVQYPAS (SEQ ID NO: 26). In an embodiment, X2 is an Fc region. In another embodiment, X2 is a variant Fc region.

[0014] In an embodiment the binding protein disclosed herein comprises a polypeptide chain, wherein the polypeptide chain comprises VD1-(X1)n-VD2-C-(X2)n, wherein VD1 is a first heavy chain variable domain, VD2 is a second heavy chain variable domain, C is a heavy chain constant domain, X1 is a linker with the proviso that it is not CH1, and X2 is an Fc region.

[0015] In an embodiment, VD1 and VD2 in the binding protein are light chain variable domains. In an embodiment, the light chain variable domain is a murine light chain variable domain, a human light chain variable domain, a CDR grafted light chain variable domain, or a humanized light chain variable domain. In one embodiment VD1 and VD2 are capable of binding the same antigen. In another embodiment VD1 and VD2 are capable of binding different antigens. In an embodiment, C is a light chain constant domain. In another embodiment, X1 is a linker with the proviso that X1 is not CL1. In an embodiment, X1 comprises AKTTPKLEEGEFSEAR (SEQ ID NO: 1); AKTTPKLEEGEFSEARV (SEQ ID NO: 2); AKTTPKLGG (SEQ ID NO: 3); SAKTTPKLGG (SEQ ID NO: 4); SAKTTP (SEQ ID NO: 5); RADAAP (SEQ ID NO: 6); RADAAPTVS (SEQ ID NO: 7); RADAAAAGGPGS (SEQ ID NO: 8); RADAAAA(G₄S)₄ (SEQ ID NO: 9); SAKTTPKLEEGEFSEARV (SEQ ID NO: 10); ADAAP (SEQ ID NO: 11); ADAAPTVSIFPP (SEQ ID NO: 12); TVAAP (SEQ ID NO: 13); TVAAPSVFIFPP (SEQ ID NO: 14); QPKAAP (SEQ ID NO: 15); QPKAAPSVTLFPP (SEQ ID NO: 16); AKTTPP (SEQ ID NO: 17); AKTTPPSVTPLAP (SEQ ID NO: 18); AKTTAP (SEQ ID NO: 19); AKTTAPSVYPLAP (SEQ ID NO: 20); ASTKGP (SEQ ID NO: 21); ASTKGPSVFPLAP (SEQ ID NO: 22), GGGGSGGGGSGGGGS (SEQ ID NO: 23); GENKVEYAPALMALS (SEQ ID NO: 24); GPAKELTPLKEAKVS (SEQ ID NO: 25); or GHEAAAVMQVQYPAS (SEQ ID NO: 26). In an embodiment, the binding protein does not comprise X2.

[0016] In an embodiment, both the variable heavy and variable light chain comprise the same linker. In another embodiment, the variable heavy and variable light chain comprise different linkers. In another embodiment, both the variable heavy and variable light chain comprise a short (about 6 amino acids) linker. In another embodiment, both the variable heavy and variable light chain comprise a long (greater than 6 amino acids) linker. In another embodiment, the variable heavy chain comprises a short linker and the variable light chain comprises a long linker. In another embodiment, the variable heavy chain comprises a long linker and the variable light chain comprises a short linker.

[0017] In an embodiment the binding protein disclosed herein comprises a polypeptide chain, wherein said polypeptide chain comprises VD1-(X1)n-VD2-C-(X2)n, wherein VD1 is a first light chain variable domain, VD2 is a second light chain variable domain, C is a light chain constant domain, X1 is a linker with the proviso that it is not CH1, and X2 does not comprise an Fc region.

[0018] In another embodiment, a binding protein comprising two polypeptide chains, wherein said first polypeptide chain comprises VD1-(X1)n-VD2-C-(X2)n, wherein VD1 is a first heavy chain variable domain, VD2 is a second heavy chain variable domain, C is a heavy chain constant domain, X1 is a linker with the proviso that it is not CH1, and X2 is an Fc region; and said second polypeptide chain comprises VD1-(X1)n-VD2-C-(X2)n, wherein VD1 is a first light chain variable domain, VD2 is a second light chain variable domain, C is a light chain constant domain, X1 is a linker with the proviso that it is not CH1, and X2 does not comprise an Fc region is provided. In a particular embodiment, the Dual Variable Domain (DVD) binding protein comprises four polypeptide chains wherein the first two polypeptide chains comprises VD1-(X1)n-VD2-C-(X2)n, respectively wherein VD1 is a first heavy chain variable domain, VD2 is a second heavy chain variable domain, C is a heavy chain constant domain, X1 is a linker with the proviso that it is not CH1, and X2 is an Fc region; and the second two polypeptide chain comprises VD1-(X1)n-VD2-C-(X2)n respectively, wherein VD1 is a first light chain variable domain, VD2 is a second light chain variable domain, C is a light chain constant domain, X1 is a linker with the proviso that it is not CH1, and X2 does not comprise an Fc region. Such a Dual Variable Domain (DVD) protein has four antigen binding sites.

[0019] In another embodiment the binding proteins disclosed herein are capable of binding one or more targets. Accordingly, in some embodiments, the binding proteins comprise at least two variable domain sequences (e.g., VD1 and VD2) capable of binding at least two different targets. In some embodiments, VD1 and VD2 are independently chosen. Therefore, in some embodiments, VD1 and VD2 comprise the same SEQ ID NO and, in other embodiments, VD1 and VD2 comprise different SEQ ID NOS.

[0020] In an embodiment, the target is a cytokine, cell surface protein, enzyme, or receptor. In another embodiment, the binding protein is capable of modulating a biological function of one or more targets. In another embodiment, the binding protein is capable of neutralizing one or more targets. In another embodiment, the binding protein is capable of binding the following exemplary cytokines: lymphokines, monokines, polypeptide hormones, receptors, or tumor markers. For example, in some embodiments, the DVD-Ig is capable of binding two or more of the following: Nerve Growth Factor (NGF), Methotrexate (MTX); NKG2D; IGF1,2; RON; ErbB3; CD-3; IGFR; HGF; VEGF; DLL4; P1GF; CD-20; EGFR; HER-2; CD-19; CD-80; CD-22; CD-40; c-MET; and NRP1 (see also Table 2). In a specific embodiment the binding protein is capable of binding the following exemplary pairs of targets: NGF and MTX; NGF and NKG2D; NGF and IGF1,2; NGF and RON; NGF and ErbB3; NGF and CD-3; NGF and IGFR; NGF and HGF; NGF and VEGF; NGF and DLL4; NGF and P1GF; NGF and CD-20; NGF and EGFR; NGF and HER-2; NGF and CD-19; NGF and CD-80; NGF and CD-22; NGF and CD-40; NGF and c-MET; or NGF and NRP1 (see Examples 2.1 to 2.60).

[0021] In an embodiment, the binding protein comprises VD1 and VD2 heavy chain variable domains comprising SEQ ID NO: 28, 30, 32, 34, 36, 38, 40, 42, 44, 46, 48, 50, 52, 54, 56, 58, 60, 62, 64, 66, 68, 70, 72, 74, 76, 78, 80, 82, 84, 86, 88, or 90; and VD1 and VD2 light chain variable domains comprising SEQ ID NO: 29, 31, 33, 35, 37, 39, 41, 43, 45, 47, 49, 51, 53, 55, 57, 59, 61, 63, 65, 67, 69, 71, 73, 75, 77, 79, 81, 83, 85, 87, 89, or 91.

[0022] In another embodiment, the binding protein comprises a heavy chain and a light chain sequence as shown in Tables 12-71.

[0023] In an embodiment, the binding protein capable of binding NGF (seq. 2) and MTX comprises a heavy chain comprising SEQ ID NO: 96 or SEQ ID NO: 98; and a light chain amino acid sequence comprising SEQ ID NO: 97 or SEQ ID NO: 99. In an embodiment, the binding protein capable of binding NGF (seq. 2) and MTX comprises a heavy chain amino acid sequence of SEQ ID NO: 96 and a light chain amino acid sequence of SEQ ID NO: 97. In another embodiment, the binding protein capable of binding NGF (seq. 1) and IL-6R has a reverse orientation and comprises a heavy chain amino acid sequence of SEQ ID NO: 98 and a light chain amino acid sequence of SEQ ID NO: 99.

[0024] In another embodiment, a binding protein comprising a polypeptide chain, wherein said polypeptide chain comprises VD1-(X1)n-VD2-C-(X2)n, wherein; VD1 is a first heavy chain variable domain obtained from a first parent antibody or antigen binding portion thereof; VD2 is a second heavy chain variable domain obtained from a second parent antibody or antigen binding portion thereof; C is a heavy chain constant domain; (X1)n is a linker with the proviso that it is not CH1, wherein said (X1)n is either present or absent; and (X2)n is an Fc region, wherein said (X2)n is either present or absent is provided. In an embodiment, the Fc region is absent from the binding protein.

[0025] In another embodiment, a binding protein comprising a polypeptide chain, wherein said polypeptide chain comprises VD1-(X1)n-VD2-C-(X2)n, wherein, VD1 is a first light chain variable domain obtained from a first parent antibody or antigen binding portion thereof; VD2 is a second light chain variable domain obtained from a second parent antibody or antigen binding portion thereof; C is a light chain constant domain; (X1)n is a linker with the proviso that it is not CH1, wherein said (X1)n is either present or absent; and (X2)n does not comprise an Fc region, wherein said (X2)n is either present or absent is provided. In an embodiment, (X2)n is absent from the binding protein.

[0026] In another embodiment the binding protein comprises first and second polypeptide chains, wherein said first polypeptide chain comprises a first VD1-(X1)n-VD2-C-(X2)n, wherein VD 1 is a first heavy chain variable domain obtained from a first parent antibody or antigen binding portion thereof; VD2 is a second heavy chain variable domain obtained from a second parent antibody or antigen binding portion thereof; C is a heavy chain constant domain; (X1)n is a linker with the proviso that it is not CH1, wherein said (X1)n is either present or absent; and (X2)n is an Fc region, wherein said (X2)n is either present or absent; and wherein said second polypeptide chain comprises a second VD1-(X1)n-VD2-C-(X2)n, wherein VD1 is a first light chain variable domain obtained from a first parent antibody or antigen binding portion thereof; VD2 is a second light chain variable domain obtained from a second parent antibody or antigen binding portion thereof; C is a light chain constant domain; (X1)n is a linker with the proviso that it is not CH1, wherein said (X1)n is either present or absent; and (X2)n does not comprise an Fc region, wherein said (X2)n is either present or absent. In another embodiment, the binding protein comprises two first polypeptide chains and two second polypeptide chains. In yet another embodiment, (X2)n is absent from the second polypeptide. In still another embodiment, the Fc region, if present in the first polypeptide is a native sequence Fc region or a variant sequence Fc region. In still another embodiment, the Fc region is an Fc region from an IgG1, IgG2, IgG3, IgG4, IgA, IgM, IgE, or IgD.

[0027] In another embodiment the binding protein is a capable of binding two antigens comprising four polypeptide chains, wherein, first and third polypeptide chains comprise VD1-(X1)n-VD2-C-(X2)n, wherein, VD1 is a first heavy chain variable domain obtained from a first parent antibody or antigen binding portion thereof; VD2 is a second heavy chain variable domain obtained from a second parent antibody or antigen binding portion thereof; C is a heavy chain constant domain; (X1)n is a linker with the proviso that it is not CH1, wherein said (X1)n is either present or absent; and (X2)n is an Fc region, wherein said (X2)n is either present or absent; and wherein second and fourth polypeptide chains comprise VD1-(X1)n-VD2-C-(X2)n, wherein VD1 is a first light chain variable domain obtained from a first parent antibody or antigen binding portion thereof; VD2 is a second light chain variable domain obtained from a second parent antibody or antigen binding portion thereof; C is a light chain constant domain; (X1)n is a linker with the proviso that it is not CH1, wherein said (X1)n is either present or absent; and (X2)n does not comprise an Fc region, wherein said (X2)n is either present or absent.

[0028] A method of making a binding protein by preselecting the parent antibodies is provided. In an embodiment, the method of making a Dual Variable Domain Immunoglobulin capable of binding two antigens comprising the steps of a) obtaining a first parent antibody or antigen binding portion thereof, capable of binding a first antigen; b) obtaining a second parent antibody or antigen binding portion thereof, capable of binding a second antigen; c) constructing first and third polypeptide chains comprising VD1-(X1)n-VD2-C-(X2)n, wherein, VD1 is a first heavy chain variable domain obtained from said first parent antibody or antigen binding portion thereof; VD2 is a second heavy chain variable domain obtained from said second parent antibody or antigen binding portion thereof; C is a heavy chain constant domain; (X1)n is a linker with the proviso that it is not CH1, wherein said (X1)n is either present or absent; and (X2)n is an Fc region, wherein said (X2)n is either present or absent; d) constructing second and fourth polypeptide chains comprising VD1-(X1)n-VD2-C-(X2)n, wherein, VD1 is a first light chain variable domain obtained from said first parent antibody or antigen binding portion thereof; VD2 is a second light chain variable domain obtained from said second parent antibody or antigen binding thereof; C is a light chain constant domain; (X1)n is a linker with the proviso that it is not CH1, wherein said (X1)n is either present or absent; and (X2)n does not comprise an Fc region, wherein said (X2)n is either present or absent; e) expressing said first, second, third and fourth polypeptide chains; such that a Dual Variable Domain Immunoglobulin capable of binding said first and said second antigen is generated.

[0029] In still another embodiment, a method of generating a Dual Variable Domain Immunoglobulin capable of binding two antigens with desired properties comprising the steps of a) obtaining a first parent antibody or antigen binding portion thereof, capable of binding a first antigen and possessing at least one desired property exhibited by the Dual Variable Domain Immunoglobulin; b) obtaining a second parent antibody or antigen binding portion thereof, capable of binding a second antigen and possessing at least one desired property exhibited by the Dual Variable Domain Immunoglobulin; c) constructing first and third polypeptide chains comprising VD1-(X1)n-VD2-C-(X2)n, wherein; VD1 is a first heavy chain variable domain obtained from said first parent antibody or antigen binding portion thereof; VD2 is a second heavy chain variable domain obtained from said second parent antibody or antigen binding portion thereof; C is a heavy chain constant domain; (X1)n is a linker with the proviso that it is not CH1, wherein said (X1)n is either present or absent; and (X2)n is an Fc region, wherein said (X2)n is either present or absent; d) constructing second and fourth polypeptide chains comprising VD1-(X1)n-VD2-C-(X2)n, wherein; VD1 is a first light chain variable domain obtained from said first parent antibody or antigen binding portion thereof; VD2 is a second light chain variable domain obtained from said second parent antibody or antigen binding portion thereof; C is a light chain constant domain; (X1)n is a linker with the proviso that it is not CH1, wherein said (X1)n is either present or absent; and (X2)n does not comprise an Fc region, wherein said (X2)n is either present or absent; e) expressing said first, second, third and fourth polypeptide chains; such that a Dual Variable Domain Immunoglobulin capable of binding said first and said second antigen with desired properties is generated is provided.

[0030] In one embodiment, the VDI of the first and second polypeptide chains disclosed herein are obtained from the same parent antibody or antigen binding portion thereof. In another embodiment, the VDI of the first and second polypeptide chains disclosed herein are obtained from different parent antibodies or antigen binding portions thereof. In another embodiment, the VD2 of the first and second polypeptide chains disclosed herein are obtained from the same parent antibody or antigen binding portion thereof. In another embodiment, the VD2 of the first and second polypeptide chains disclosed herein are obtained from different parent antibodies or antigen binding portions thereof.

[0031] In one embodiment the first parent antibody or antigen binding portion thereof, and the second parent antibody or antigen binding portion thereof, are the same antibody. In another embodiment the first parent antibody or antigen binding portion thereof, and the second parent antibody or antigen binding portion thereof, are different antibodies.

[0032] In one embodiment the first parent antibody or antigen binding portion thereof, binds a first antigen and the second parent antibody or antigen binding portion thereof, binds a second antigen. In a particular embodiment, the first and second antigens are the same antigen. In another embodiment, the parent antibodies bind different epitopes on the same antigen. In another embodiment the first and second antigens are different antigens. In another embodiment, the first parent antibody or antigen binding portion thereof, binds the first antigen with a potency different from the potency with which the second parent antibody or antigen binding portion thereof, binds the second antigen. In yet another embodiment, the first parent antibody or antigen binding portion thereof, binds the first antigen with an affinity different from the affinity with which the second parent antibody or antigen binding portion thereof, binds the second antigen.

[0033] In another embodiment the first parent antibody or antigen binding portion thereof, and the second parent antibody or antigen binding portion thereof, are a human antibody, CDR grafted antibody, or humanized antibody. In an embodiment, the antigen binding portions are a Fab fragment, a F(ab′)₂ fragment, a bivalent fragment comprising two Fab fragments linked by a disulfide bridge at the hinge region, a Fd fragment consisting of the VH and CH1 domains, a Fv fragment consisting of the VL and VH domains of a single arm of an antibody, a dAb fragment, an isolated complementarity determining region (CDR), a single chain antibody, or diabodies.

[0034] In another embodiment the binding protein possesses at least one desired property exhibited by the first parent antibody or antigen binding portion thereof, or the second parent antibody or antigen binding portion thereof. Alternatively, the first parent antibody or antigen binding portion thereof and the second parent antibody or antigen binding portion thereof possess at least one desired property exhibited by the Dual Variable Domain Immunoglobulin. In an embodiment, the desired property is one or more antibody parameters. In another embodiment, the antibody parameters are antigen specificity, affinity to antigen, potency, biological function, epitope recognition, stability, solubility, production efficiency, immunogenicity, pharmacokinetics, bioavailability, tissue cross reactivity, or orthologous antigen binding. In an embodiment the binding protein is multivalent. In another embodiment, the binding protein is multispecific. The multivalent and or multispecific binding proteins described herein have desirable properties particularly from a therapeutic standpoint. For instance, the multivalent and or multispecific binding protein may (1) be internalized (and/or catabolized) faster than a bivalent antibody by a cell expressing an antigen to which the antibodies bind; (2) be an agonist antibody; and/or (3) induce cell death and/or apoptosis of a cell expressing an antigen which the multivalent antibody is capable of binding to. The “parent antibody” which provides at least one antigen binding specificity of the multivalent and or multispecific binding proteins may be one which is internalized (and/or catabolized) by a cell expressing an antigen to which the antibody binds; and/or may be an agonist, cell death-inducing, and/or apoptosis-inducing antibody, and the multivalent and or multispecific binding protein as described herein may display improvement(s) in one or more of these properties. Moreover, the parent antibody may lack any one or more of these properties, but may be endowed with them when constructed as a multivalent binding protein as described herein.

[0035] In another embodiment the binding protein has an on rate constant (Kon) to one or more targets of: at least about 10²M⁻¹s⁻¹; at least about 10³M⁻¹s⁻¹; at least about 10⁴M⁻¹s⁻¹; at least about 10⁵M⁻¹s⁻¹; or at least about 10⁶M⁻¹s⁻¹, as measured by surface plasmon resonance. In an embodiment, the binding protein has an on rate constant (Kon) to one or more targets between 10²M⁻¹s⁻¹ and 10³M⁻¹s⁴; between 10³M⁻¹s⁻¹ and 10⁴M⁻¹s⁻¹; between 10⁴M⁻¹s⁻¹ and 10⁵M⁻¹s⁻¹; or between 10⁵M⁻¹s⁻¹ and 10⁶M⁻¹s⁻¹, as measured by surface plasmon resonance.

[0036] In another embodiment the binding protein has an off rate constant (Koff) for one or more targets of: at most about 10⁻³s⁻¹; at most about 10⁻⁴s⁻¹; at most about 10⁻⁵s⁻¹; or at most about 10⁻⁶s⁻¹, as measured by surface plasmon resonance. In an embodiment, the binding protein has an off rate constant (Koff) to one or more targets of 10⁻³s⁻¹ to 10⁴s⁻¹; of 10⁻⁴s⁻¹ to 10⁻⁵s⁴; or of 10⁻⁵s⁻¹ to 10⁻⁶s⁻¹, as measured by surface plasmon resonance.

[0037] In another embodiment the binding protein has a dissociation constant (K_{D}) to one or more targets of: at most about 10⁻⁷M; at most about 10⁻⁸M; at most about 10⁻⁹M; at most about 10⁻¹⁰M; at most about 10⁻¹¹M; at most about 10⁻¹²M; or at most 10⁻¹³M. In an embodiment, the binding protein has a dissociation constant (K_{D}) to its targets of 10⁻⁷M to 10⁻⁸M; of 10⁻⁸M to 10⁻⁹M; of 10⁻⁹M to 10⁻¹⁰M; of 10⁻¹⁰M to 10⁻¹¹M; of 10⁻¹¹M to 10⁻¹²M; or of 10⁻¹² to M 10⁻¹³M.

[0038] In another embodiment, the binding protein described herein is a conjugate further comprising an agent. In another embodiment, the agent is an immunoadhesion molecule, an imaging agent, a therapeutic agent, or a cytotoxic agent. In an embodiment, the imaging agent is a radiolabel, an enzyme, a fluorescent label, a luminescent label, a bioluminescent label, a magnetic label, or biotin. In another embodiment, the radiolabel is: ³H, ¹⁴C, ³⁵S, ⁹⁰Y, ⁹⁹Tc, ¹¹¹In, ¹²⁵I, ¹³¹I, ¹⁷⁷Lu, ¹⁶⁶Ho, or ¹⁵³Sm. In yet another embodiment, the therapeutic or cytotoxic agent is an anti-metabolite, an alkylating agent, an antibiotic, a growth factor, a cytokine, an anti-angiogenic agent, an anti-mitotic agent, an anthracycline, toxin, or an apoptotic agent.

[0039] In another embodiment, the binding protein described herein is a crystallized binding protein and exists as a crystal. In an embodiment, the crystal is a carrier-free pharmaceutical controlled release crystal. In yet another embodiment, the crystallized binding protein has a greater half life in vivo than the soluble counterpart of said binding protein. In still another embodiment, the crystallized binding protein retains biological activity.

[0040] In another embodiment, the binding protein described herein is glycosylated. For example, the glycosylation is a human glycosylation pattern.

[0041] An isolated nucleic acid encoding any one of the binding proteins disclosed herein is also provided. A further embodiment provides a vector comprising the isolated nucleic acid disclosed herein wherein said vector is pcDNA; pTT (Durocher et al., Nucleic Acids Research 2002, Vol 30, No. 2); pTT3 (pTT with additional multiple cloning site; pEFBOS (Mizushima, S, and Nagata, S., (1990) Nucleic acids Research Vol 18, No. 17); pBV; pJV; pcDNA3.1 TOPO; pEF6 TOPO; or pBJ. In an embodiment, the vector is a vector disclosed in U.S. Patent Application Ser. No. 61/021,282.

[0042] In another aspect a host cell is transformed with the vector disclosed herein. In an embodiment, the host cell is a prokaryotic cell. In another embodiment, the host cell is E. coli. In a related embodiment the host cell is a eukaryotic cell. In another embodiment, the eukaryotic cell is a protist cell, animal cell, plant cell, or fungal cell. In yet another embodiment, the host cell is a mammalian cell including, but not limited to, CHO, COS; NSO, SP2, PER.C6 or a fungal cell such as Saccharomyces cerevisiae; or an insect cell such as Sf9.

[0043] In an embodiment, two or more, e.g., with different specificities, are produced in a single recombinant host cell. For example, the expression of a mixture of antibodies has been called Oligoclonics™, (Merus B. V., The Netherlands) U.S. Pat. Nos. 7,262,028; 7,429,486.

[0044] A method of producing a binding protein disclosed herein comprising culturing any one of the host cells also disclosed herein in a culture medium under conditions sufficient to produce the binding protein is provided. In an embodiment, 50%-75% of the binding protein produced by this method is a dual specific tetravalent binding protein. In a particular embodiment, 75%-90% of the binding protein produced by this method is a dual specific tetravalent binding protein. In a particular embodiment, 90%-95% of the binding protein produced is a dual specific tetravalent binding protein.

[0045] One embodiment provides a composition for the release of a binding protein wherein the composition comprises a formulation that in turn comprises a crystallized binding protein, as disclosed herein, and an ingredient, and at least one polymeric carrier. For example, the polymeric carrier is: poly (acrylic acid), poly (cyanoacrylates), poly (amino acids), poly (anhydrides), poly (depsipeptide), poly (esters), poly (lactic acid), poly (lactic-co-glycolic acid) or PLGA, poly (b-hydroxybutryate), poly (caprolactone), poly (dioxanone); poly (ethylene glycol), poly ((hydroxypropyl)methacrylamide, poly [(organo)phosphazene], poly (ortho esters), poly (vinyl alcohol), poly (vinylpyrrolidone), maleic anhydride-alkyl vinyl ether copolymers, pluronic polyols, albumin, alginate, cellulose and cellulose derivatives, collagen, fibrin, gelatin, hyaluronic acid, oligosaccharides, glycaminoglycans, sulfated polysaccharides, or blends and copolymers thereof. For example, the ingredient may be albumin, sucrose, trehalose, lactitol, gelatin, hydroxypropyl-β-cyclodextrin, methoxypolyethylene glycol, or polyethylene glycol. Another embodiment provides a method for treating a mammal comprising the step of administering to the mammal an effective amount of the composition disclosed herein.

[0046] A pharmaceutical composition comprising a binding protein, as disclosed herein and a pharmaceutically acceptable carrier is provided. In a further embodiment the pharmaceutical composition comprises at least one additional therapeutic agent for treating a disorder. For example, the additional agent may be a therapeutic agent, an imaging agent, a cytotoxic agent, an angiogenesis inhibitor (including but not limited to an anti-VEGF antibody or a VEGF-trap), a kinase inhibitor (including but not limited to a KDR and a TIE-2 inhibitor), a co-stimulation molecule blocker (including but not limited to anti-B7.1, anti-B7.2, CTLA4-Ig, anti-CD20), an adhesion molecule blocker (including but not limited to an anti-LFA-1 antibody, an anti-EIL selectin antibody, a small molecule inhibitor), an anti-cytokine antibody or functional fragment thereof (including but not limited to an anti-IL-18, an anti-TNF, and an anti-IL-6/cytokine receptor antibody), methotrexate, cyclosporin, rapamycin, FK506, a detectable label or reporter, a TNF antagonist, an antirheumatic, a muscle relaxant, a narcotic, a non-steroid anti-inflammatory drug (NSAID), an analgesic, an anesthetic, a sedative, a local anesthetic, a neuromuscular blocker, an antimicrobial, an antipsoriatic, a corticosteriod, an anabolic steroid, an erythropoietin, an immunization, an immunoglobulin, an immunosuppressive, a growth hormone, a hormone replacement drug, a radiopharmaceutical, an antidepressant, an antipsychotic, a stimulant, an asthma medication, a beta agonist, an inhaled steroid, an epinephrine or analog, a cytokine, or a cytokine antagonist.

[0047] A method for treating a human subject suffering from a disorder in which the target, or targets, capable of being bound by the binding protein disclosed herein is detrimental, comprising administering to the human subject a binding protein disclosed herein such that the activity of the target, or targets in the human subject is inhibited and one of more symptoms is alleviated or treatment is achieved is provided. For example, the disorder may be arthritis, osteoarthritis, juvenile chronic arthritis, septic arthritis, Lyme arthritis, psoriatic arthritis, reactive arthritis, spondyloarthropathy, systemic lupus erythematosus, Crohn's disease, ulcerative colitis, inflammatory bowel disease, insulin dependent diabetes mellitus, thyroiditis, asthma, allergic diseases, psoriasis, dermatitis scleroderma, graft versus host disease, organ transplant rejection, acute or chronic immune disease associated with organ transplantation, sarcoidosis, atherosclerosis, disseminated intravascular coagulation, Kawasaki's disease, Grave's disease, nephrotic syndrome, chronic fatigue syndrome, Wegener's granulomatosis, Henoch-Schoenlein purpurea, microscopic vasculitis of the kidneys, chronic active hepatitis, uveitis, septic shock, toxic shock syndrome, sepsis syndrome, cachexia, infectious diseases, parasitic diseases, acquired immunodeficiency syndrome, acute transverse myelitis, Huntington's chorea, Parkinson's disease, Alzheimer's disease, stroke, primary biliary cirrhosis, hemolytic anemia, malignancies, heart failure, myocardial infarction, Addison's disease, sporadic polyglandular deficiency type I and polyglandular deficiency type II, Schmidt's syndrome, adult (acute) respiratory distress syndrome, alopecia, alopecia greata, seronegative arthopathy, arthropathy, Reiter's disease, psoriatic arthropathy, ulcerative colitic arthropathy, enteropathic synovitis, chlamydia, yersinia and salmonella associated arthropathy, spondyloarthopathy, atheromatous disease/arteriosclerosis, atopic allergy, autoimmune bullous disease, pemphigus vulgaris, pemphigus foliaceus, pemphigoid, linear IgA disease, autoimmune haemolytic anaemia, Coombs positive haemolytic anaemia, acquired pernicious anaemia, juvenile pernicious anaemia, myalgic encephalitis/Royal Free Disease, chronic mucocutaneous candidiasis, giant cell arteritis, primary sclerosing hepatitis, cryptogenic autoimmune hepatitis, Acquired Immunodeficiency Disease Syndrome, Acquired Immunodeficiency Related Diseases, Hepatitis B, Hepatitis C, common varied immunodeficiency (common variable hypogammaglobulinaemia), dilated cardiomyopathy, female infertility, ovarian failure, premature ovarian failure, fibrotic lung disease, cryptogenic fibrosing alveolitis, post-inflammatory interstitial lung disease, interstitial pneumonitis, connective tissue disease associated interstitial lung disease, mixed connective tissue disease associated lung disease, systemic sclerosis associated interstitial lung disease, rheumatoid arthritis associated interstitial lung disease, systemic lupus erythematosus associated lung disease, dermatomyositis/polymyositis associated lung disease, Sjogren's disease associated lung disease, ankylosing spondylitis associated lung disease, vasculitic diffuse lung disease, haemosiderosis associated lung disease, drug-induced interstitial lung disease, fibrosis, radiation fibrosis, bronchiolitis obliterans, chronic eosinophilic pneumonia, lymphocytic infiltrative lung disease, postinfectious interstitial lung disease, gouty arthritis, autoimmune hepatitis, type-1 autoimmune hepatitis (classical autoimmune or lupoid hepatitis), type-2 autoimmune hepatitis (anti-LKM antibody hepatitis), autoimmune mediated hypoglycaemia, type B insulin resistance with acanthosis nigricans, hypoparathyroidism, acute immune disease associated with organ transplantation, chronic immune disease associated with organ transplantation, osteoarthrosis, primary sclerosing cholangitis, psoriasis type 1, psoriasis type 2, idiopathic leucopaenia, autoimmune neutropaenia, renal disease NOS, glomerulonephritides, microscopic vasulitis of the kidneys, lyme disease, discoid lupus erythematosus, male infertility idiopathic or NOS, sperm autoimmunity, multiple sclerosis (all subtypes), sympathetic ophthalmia, pulmonary hypertension secondary to connective tissue disease, Goodpasture's syndrome, pulmonary manifestation of polyarteritis nodosa, acute rheumatic fever, rheumatoid spondylitis, Still's disease, systemic sclerosis, Sjorgren's syndrome, Takayasu's disease/arteritis, autoimmune thrombocytopaenia, idiopathic thrombocytopaenia, autoimmune thyroid disease, hyperthyroidism, goitrous autoimmune hypothyroidism (Hashimoto's disease), atrophic autoimmune hypothyroidism, primary myxoedema, phacogenic uveitis, primary vasculitis, vitiligo acute liver disease, chronic liver diseases, alcoholic cirrhosis, alcohol-induced liver injury, choleosatatis, idiosyncratic liver disease, Drug-Induced hepatitis, Non-alcoholic Steatohepatitis, allergy and asthma, group B streptococci (GBS) infection, mental disorders (e.g., depression and schizophrenia), Th2 Type and Th1 Type mediated diseases, acute and chronic pain (different forms of pain), and cancers such as lung, breast, stomach, bladder, colon, pancreas, ovarian, prostate and rectal cancer and hematopoietic malignancies (leukemia and lymphoma), Abetalipoprotemia, Acrocyanosis, acute and chronic parasitic or infectious processes, acute leukemia, acute lymphoblastic leukemia (ALL), acute myeloid leukemia (AML), acute or chronic bacterial infection, acute pancreatitis, acute renal failure, adenocarcinomas, aerial ectopic beats, AIDS dementia complex, alcohol-induced hepatitis, allergic conjunctivitis, allergic contact dermatitis, allergic rhinitis, allograft rejection, alpha-1-antitrypsin deficiency, amyotrophic lateral sclerosis, anemia, angina pectoris, anterior horn cell degeneration, anti cd3 therapy, antiphospholipid syndrome, anti-receptor hypersensitivity reactions, aortic and peripheral aneuryisms, aortic dissection, arterial hypertension, arteriosclerosis, arteriovenous fistula, ataxia, atrial fibrillation (sustained or paroxysmal), atrial flutter, atrioventricular block, B cell lymphoma, bone graft rejection, bone marrow transplant (BMT) rejection, bundle branch block, Burkitt's lymphoma, Burns, cardiac arrhythmias, cardiac stun syndrome, cardiac tumors, cardiomyopathy, cardiopulmonary bypass inflammation response, cartilage transplant rejection, cerebellar cortical degenerations, cerebellar disorders, chaotic or multifocal atrial tachycardia, chemotherapy associated disorders, chronic myelocytic leukemia (CML), chronic alcoholism, chronic inflammatory pathologies, chronic lymphocytic leukemia (CLL), chronic obstructive pulmonary disease (COPD), chronic salicylate intoxication, colorectal carcinoma, congestive heart failure, conjunctivitis, contact dermatitis, cor pulmonale, coronary artery disease, Creutzfeldt-Jakob disease, culture negative sepsis, cystic fibrosis, cytokine therapy associated disorders, Dementia pugilistica, demyelinating diseases, dengue hemorrhagic fever, dermatitis, dermatologic conditions, diabetes, diabetes mellitus, diabetic ateriosclerotic disease, Diffuse Lewy body disease, dilated congestive cardiomyopathy, disorders of the basal ganglia, Down's Syndrome in middle age, drug-induced movement disorders induced by drugs which block CNS dopamine receptors, drug sensitivity, eczema, encephalomyelitis, endocarditis, endocrinopathy, epiglottitis, epstein-barr virus infection, erythromelalgia, extrapyramidal and cerebellar disorders, familial hematophagocytic lymphohistiocytosis, fetal thymus implant rejection, Friedreich's ataxia, functional peripheral arterial disorders, fungal sepsis, gas gangrene, gastric ulcer, glomerular nephritis, graft rejection of any organ or tissue, gram negative sepsis, gram positive sepsis, granulomas due to intracellular organisms, hairy cell leukemia, Hallerrorden-Spatz disease, hashimoto's thyroiditis, hay fever, heart transplant rejection, hemachromatosis, hemodialysis, hemolytic uremic syndrome/thrombolytic thrombocytopenic purpura, hemorrhage, hepatitis (A), His bundle arrythmias, HIV infection/HIV neuropathy, Hodgkin's disease, hyperkinetic movement disorders, hypersensitity reactions, hypersensitivity pneumonitis, hypertension, hypokinetic movement disorders, hypothalamic-pituitary-adrenal axis evaluation, idiopathic Addison's disease, idiopathic pulmonary fibrosis, antibody mediated cytotoxicity, Asthenia, infantile spinal muscular atrophy, inflammation of the aorta, influenza a, ionizing radiation exposure, iridocyclitis/uveitis/optic neuritis, ischemia-reperfusion injury, ischemic stroke, juvenile rheumatoid arthritis, juvenile spinal muscular atrophy, Kaposi's sarcoma, kidney transplant rejection, legionella, leishmaniasis, leprosy, lesions of the corticospinal system, lipedema, liver transplant rejection, lymphederma, malaria, malignamt Lymphoma, malignant histiocytosis, malignant melanoma, meningitis, meningococcemia, metabolic/idiopathic diseases, migraine headache, mitochondrial multi system disorder, mixed connective tissue disease, monoclonal gammopathy, multiple myeloma, multiple systems degenerations (Mencel Dejerine-Thomas Shi-Drager and Machado-Joseph), myasthenia gravis, mycobacterium avium intracellulare, mycobacterium tuberculosis, myelodyplastic syndrome, myocardial infarction, myocardial ischemic disorders, nasopharyngeal carcinoma, neonatal chronic lung disease, nephritis, nephrosis, neurodegenerative diseases, neurogenic I muscular atrophies, neutropenic fever, non-hodgkins lymphoma, occlusion of the abdominal aorta and its branches, occlusive arterial disorders, okt3 therapy, orchitis/epidydimitis, orchitis/vasectomy reversal procedures, organomegaly, osteoporosis, pancreas transplant rejection, pancreatic carcinoma, paraneoplastic syndrome/hypercalcemia of malignancy, parathyroid transplant rejection, pelvic inflammatory disease, perennial rhinitis, pericardial disease, peripheral atherlosclerotic disease, peripheral vascular disorders, peritonitis, pernicious anemia, pneumocystis carinii pneumonia, pneumonia, POEMS syndrome (polyneuropathy, organomegaly, endocrinopathy, monoclonal gammopathy, and skin changes syndrome), post perfusion syndrome, post pump syndrome, post-MI cardiotomy syndrome, preeclampsia, Progressive supranucleo Palsy, primary pulmonary hypertension, radiation therapy, Raynaud's phenomenon and disease, Raynoud's disease, Refsum's disease, regular narrow QRS tachycardia, renovascular hypertension, reperfusion injury, restrictive cardiomyopathy, sarcomas, scleroderma, senile chorea, Senile Dementia of Lewy body type, seronegative arthropathies, shock, sickle cell anemia, skin allograft rejection, skin changes syndrome, small bowel transplant rejection, solid tumors, specific arrythmias, spinal ataxia, spinocerebellar degenerations, streptococcal myositis, structural lesions of the cerebellum, Subacute sclerosing panencephalitis, Syncope, syphilis of the cardiovascular system, systemic anaphalaxis, systemic inflammatory response syndrome, systemic onset juvenile rheumatoid arthritis, T-cell or FAB ALL, Telangiectasia, thromboangitis obliterans, thrombocytopenia, toxicity, transplants, trauma/hemorrhage, type III hypersensitivity reactions, type IV hypersensitivity, unstable angina, uremia, urosepsis, urticaria, valvular heart diseases, varicose veins, vasculitis, venous diseases, venous thrombosis, ventricular fibrillation, viral and fungal infections, vital encephalitis/aseptic meningitis, vital-associated hemaphagocytic syndrome, Wernicke-Korsakoff syndrome, Wilson's disease, or xenograft rejection of any organ or tissue.

[0048] In an embodiment, diseases that can be treated or diagnosed with the compositions and methods include, but are not limited to, primary and metastatic cancers, including carcinomas of breast, colon, rectum, lung, oropharynx, hypopharynx, esophagus, stomach, pancreas, liver, gallbladder and bile ducts, small intestine, urinary tract (including kidney, bladder and urothelium), female genital tract (including cervix, uterus, and ovaries as well as choriocarcinoma and gestational trophoblastic disease), male genital tract (including prostate, seminal vesicles, testes and germ cell tumors), endocrine glands (including the thyroid, adrenal, and pituitary glands), and skin, as well as hemangiomas, melanomas, sarcomas (including those arising from bone and soft tissues as well as Kaposi's sarcoma), tumors of the brain, nerves, eyes, and meninges (including astrocytomas, gliomas, glioblastomas, retinoblastomas, neuromas, neuroblastomas, Schwannomas, and meningiomas), solid tumors arising from hematopoietic malignancies such as leukemias, and lymphomas (both Hodgkin's and non-Hodgkin's lymphomas).

[0049] The DVD-Igs may also treat one or more of the following diseases: Acute coronary syndromes, Acute Idiopathic Polyneuritis, Acute Inflammatory Demyelinating Polyradiculoneuropathy, Acute ischemia, Adult Still's Disease, Alopecia greata, Anaphylaxis, Anti-Phospholipid Antibody Syndrome, Aplastic anemia, Arteriosclerosis, Atopic eczema, Atopic dermatitis, Autoimmune dermatitis, Autoimmune disorder associated with Streptococcus infection, autoimmune enteropathy, Autoimmune hearingloss, Autoimmune Lymphoproliferative Syndrome (ALPS), Autoimmune myocarditis, autoimmune thrombocytopenia (AITP), autoimmune premature ovarian failure, Blepharitis, Bronchiectasis, Bullous pemphigoid, Cardiovascular Disease, Catastrophic Antiphospholipid Syndrome, Celiac Disease, Cervical Spondylosis, Chronic ischemia, Cicatricial pemphigoid, Clinically isolated Syndrome (CIS) with Risk for Multiple Sclerosis, Conjunctivitis, Childhood Onset Psychiatric Disorder, Chronic obstructive pulmonary disease (COPD), Dacryocystitis, dermatomyositis, Diabetic retinopathy, Diabetes mellitus, Disk herniation, Disk prolaps, Drug induced immune hemolytic anemia, Endocarditis, Endometriosis, endophthalmitis, Episcleritis, Erythema multiforme, erythema multiforme major, Gestational pemphigoid, Guillain-Barré Syndrome (GBS), Hay Fever, Hughes Syndrome, Idiopathic Parkinson's Disease, idiopathic interstitial pneumonia, IgE-mediated Allergy, Immune hemolytic anemia, Inclusion Body Myositis, Infectious ocular inflammatory disease, Inflammatory demyelinating disease, Inflammatory heart disease, Inflammatory kidney disease, IPF/UIP, Iritis, Keratitis, Keratojuntivitis sicca, Kussmaul disease or Kussmaul-Meier Disease, Landry's Paralysis, Langerhan's Cell Histiocytosis, Livedo reticularis, Macular Degeneration, malignancies, Microscopic Polyangiitis, Morbus Bechterev, Motor Neuron Disorders, Mucous membrane pemphigoid, Multiple Organ failure, Myasthenia Gravis, Myelodysplastic Syndrome, Myocarditis, Nerve Root Disorders, Neuropathy, Non-A Non-B Hepatitis, Optic Neuritis, Osteolysis, Ovarian cancer, Pauciarticular JRA, peripheral artery occlusive disease (PAOD), peripheral vascular disease (PVD), peripheral artery disease (PAD), Phlebitis, Polyarteritis nodosa (or periarteritis nodosa), Polychondritis, Polymyalgia Rheumatica, Poliosis, Polyarticular JRA, Polyendocrine Deficiency Syndrome, Polymyositis, polymyalgia rheumatica (PMR), Post-Pump Syndrome, primary Parkinsonism, prostate and rectal cancer and hematopoietic malignancies (leukemia and lymphoma), Prostatitis, Pure red cell aplasia, Primary Adrenal Insufficiency, Recurrent Neuromyelitis Optica, Restenosis, Rheumatic heart disease, SAPHO (synovitis, acne, pustulosis, hyperostosis, and osteitis), Scleroderma, Secondary Amyloidosis, Shock lung, Scleritis, Sciatica, Secondary Adrenal Insufficiency, Silicone associated connective tissue disease, Sneddon-Wilkinson Dermatosis, spondilitis ankylosans, Stevens-Johnson Syndrome (SJS), Systemic inflammatory response syndrome, Temporal arteritis, toxoplasmic retinitis, toxic epidermal necrolysis, Transverse myelitis, TRAPS (Tumor Necrosis Factor Receptor, Type 1 allergic reaction, Type II Diabetes, Urticaria, Usual interstitial pneumonia (UIP), Vasculitis, Vernal conjunctivitis, viral retinitis, Vogt-Koyanagi-Harada syndrome (VKH syndrome), Wet macular degeneration, Wound healing, yersinia, and salmonella associated arthropathy.

[0050] In an embodiment, the antibodies or antigen-binding portions thereof, are used to treat cancer or in the prevention of metastases from the tumors described herein either when used alone or in combination with radiotherapy and/or other chemotherapeutic agents.

[0051] In another aspect a method of treating a patient suffering from a disorder comprising the step of administering any one of the binding proteins disclosed herein before, concurrent, or after the administration of a second agent, as discussed herein is provided. In a particular embodiment the second agent is budenoside, epidermal growth factor, corticosteroids, cyclosporin, sulfasalazine, aminosalicylates, 6-mercaptopurine, azathioprine, metronidazole, lipoxygenase inhibitors, mesalamine, olsalazine, balsalazide, antioxidants, thromboxane inhibitors, IL-1 receptor antagonists, anti-IL-1β mAbs, anti-IL-6 or IL-6 receptor mAbs, growth factors, elastase inhibitors, pyridinyl-imidazole compounds, antibodies or agonists of TNF, LT, IL-1, IL-2, IL-6, IL-7, IL-8, IL-12, IL-13, IL-15, IL-16, IL-18, IL-23, EMAP-II, GM-CSF, FGF, and PDGF, antibodies of CD2, CD3, CD4, CD8, CD-19, CD25, CD28, CD30, CD40, CD45, CD69, CD90 or their ligands, methotrexate, cyclosporin, FK506, rapamycin, mycophenolate mofetil, leflunomide, NSAIDs, ibuprofen, corticosteroids, prednisolone, phosphodiesterase inhibitors, adenosine agonists, antithrombotic agents, complement inhibitors, adrenergic agents, IRAK, NM, IKK, p38, MAP kinase inhibitors, IL-1β converting enzyme inhibitors, TNFα-converting enzyme inhibitors, T-cell signalling inhibitors, metalloproteinase inhibitors, sulfasalazine, azathioprine, 6-mercaptopurines, angiotensin converting enzyme inhibitors, soluble cytokine receptors, soluble p55 TNF receptor, soluble p75 TNF receptor, sIL-1RI, sIL-1R11, sIL-6R, antiinflammatory cytokines, IL-4, IL-10, IL-11, IL-13, or TGFβ. In a particular embodiment the pharmaceutical compositions disclosed herein are administered to the patient by parenteral, subcutaneous, intramuscular, intravenous, intrarticular, intrabronchial, intraabdominal, intracapsular, intracartilaginous, intracavitary, intracelial, intracerebellar, intracerebroventricular, intracolic, intracervical, intragastric, intrahepatic, intramyocardial, intraosteal, intrapelvic, intrapericardiac, intraperitoneal, intrapleural, intraprostatic, intrapulmonary, intrarectal, intrarenal, intraretinal, intraspinal, intrasynovial, intrathoracic, intrauterine, intravesical, bolus, vaginal, rectal, buccal, sublingual, intranasal, or transdermal administration.

[0052] At least one anti-idiotype antibody to at least one binding protein of the present invention is also provided. The anti-idiotype antibody includes any protein or peptide containing molecule that comprises at least a portion of an immunoglobulin molecule such as, but not limited to, at least one complementarily determining region (CDR) of a heavy or light chain or a ligand binding portion thereof, a heavy chain or light chain variable region, a heavy chain or light chain constant region, a framework region, or any portion thereof, that can be incorporated into a binding protein provided herein.

### BRIEF DESCRIPTION OF THE DRAWINGS

[0053] FIG. 1A is a schematic representation of Dual Variable Domain (DVD)-Ig constructs and shows the strategy for generation of a DVD-Ig from two parent antibodies;

[0054] FIG. 1B, is a schematic representation of constructs DVD1-Ig, DVD2-Ig, and two chimeric mono-specific antibodies from hybridoma clones 2D13.E3 (anti-IL-1α) and 13F5.G5 (anti-IL-1β).

### DETAILED DESCRIPTION

[0055] Multivalent and/or multispecific binding proteins capable of binding two or more antigens are provided. Dual variable domain immunoglobulins (DVD-Ig), and pharmaceutical compositions thereof, as well as nucleic acids, recombinant expression vectors and host cells for making such DVD-Igs. Methods of using the DVD-Igs to detect specific antigens, either in vitro or in vivo are also provided.

[0056] Unless otherwise defined herein, scientific and technical terms used herein shall have the meanings that are commonly understood by those of ordinary skill in the art. The meaning and scope of the terms should be clear, however, in the event of any latent ambiguity, definitions provided herein take precedent over any dictionary or extrinsic definition. Further, unless otherwise required by context, singular terms shall include pluralities and plural terms shall include the singular. In this application, the use of “or” means “and/or” unless stated otherwise. Furthermore, the use of the term “including”, as well as other forms, such as “includes” and “included”, is not limiting. Also, terms such as “element” or “component” encompass both elements and components comprising one unit and elements and components that comprise more than one subunit unless specifically stated otherwise.

[0057] Generally, nomenclatures used in connection with, and techniques of, cell and tissue culture, molecular biology, immunology, microbiology, genetics and protein and nucleic acid chemistry and hybridization described herein are those well known and commonly used in the art. The methods and techniques provided herein are generally performed according to conventional methods well known in the art and as described in various general and more specific references that are cited and discussed throughout the present specification unless otherwise indicated. Enzymatic reactions and purification techniques are performed according to manufacturer's specifications, as commonly accomplished in the art or as described herein. The nomenclatures used in connection with, and the laboratory procedures and techniques of, analytical chemistry, synthetic organic chemistry, and medicinal and pharmaceutical chemistry described herein are those well known and commonly used in the art. Standard techniques are used for chemical syntheses, chemical analyses, pharmaceutical preparation, formulation, and delivery, and treatment of patients.

[0058] That the present invention may be more readily understood, select terms are defined below.

[0059] The term “polypeptide” as used herein, refers to any polymeric chain of amino acids. The terms “peptide” and “protein” are used interchangeably with the term polypeptide and also refer to a polymeric chain of amino acids. The term “polypeptide” encompasses native or artificial proteins, protein fragments and polypeptide analogs of a protein sequence. A polypeptide may be monomeric or polymeric. Use of “polypeptide” herein is intended to encompass polypeptide and fragments and variants (including fragments of variants) thereof, unless otherwise contradicted by context. For an antigenic polypeptide, a fragment of polypeptide optionally contains at least one contiguous or nonlinear epitope of polypeptide. The precise boundaries of the at least one epitope fragment can be confirmed using ordinary skill in the art. The fragment comprises at least about 5 contiguous amino acids, such as at least about 10 contiguous amino acids, at least about 15 contiguous amino acids, or at least about 20 contiguous amino acids. A variant of polypeptide is as described herein.

[0060] The term “isolated protein” or “isolated polypeptide” is a protein or polypeptide that by virtue of its origin or source of derivation is not associated with naturally associated components that accompany it in its native state; is substantially free of other proteins from the same species; is expressed by a cell from a different species; or does not occur in nature. Thus, a polypeptide that is chemically synthesized or synthesized in a cellular system different from the cell from which it naturally originates will be “isolated” from its naturally associated components. A protein may also be rendered substantially free of naturally associated components by isolation, using protein purification techniques well known in the art.

[0061] The term “recovering” as used herein, refers to the process of rendering a chemical species such as a polypeptide substantially free of naturally associated components by isolation, e.g., using protein purification techniques well known in the art.

[0062] “Biological activity” as used herein, refers to any one or more inherent biological properties of a molecule (whether present naturally as found in vivo, or provided or enabled by recombinant means). Biological properties include but are not limited to binding receptor; induction of cell proliferation, inhibiting cell growth, inductions of other cytokines, induction of apoptosis, and enzymatic activity. Biological activity also includes activity of an Ig molecule.

[0063] The terms “specific binding” or “specifically binding”, as used herein, in reference to the interaction of an antibody, a protein, or a peptide with a second chemical species, mean that the interaction is dependent upon the presence of a particular structure (e.g., an antigenic determinant or epitope) on the chemical species; for example, an antibody recognizes and binds to a specific protein structure rather than to proteins generally. If an antibody is specific for epitope “A”, the presence of a molecule containing epitope A (or free, unlabeled A), in a reaction containing labeled “A” and the antibody, will reduce the amount of labeled A bound to the antibody.

[0064] The term “antibody”, as used herein, broadly refers to any immunoglobulin (Ig) molecule comprised of four polypeptide chains, two heavy (H) chains and two light (L) chains, or any functional fragment, mutant, variant, or derivation thereof, which retains the essential epitope binding features of an Ig molecule. Such mutant, variant, or derivative antibody formats are known in the art. Nonlimiting embodiments of which are discussed below.

[0065] In a full-length antibody, each heavy chain is comprised of a heavy chain variable region (abbreviated herein as HCVR or VH) and a heavy chain constant region. The heavy chain constant region is comprised of three domains, CH1, CH₂ and CH3. Each light chain is comprised of a light chain variable region (abbreviated herein as LCVR or VL) and a light chain constant region. The light chain constant region is comprised of one domain, CL. The VH and VL regions can be further subdivided into regions of hypervariability, termed complementarity determining regions (CDR), interspersed with regions that are more conserved, termed framework regions (FR). Each VH and VL is composed of three CDRs and four FRs, arranged from amino-terminus to carboxy-terminus in the following order: FR1, CDR1, FR2, CDR2, FR3, CDR3, FR4. Immunoglobulin molecules can be of any type (e.g., IgG, IgE, IgM, IgD, IgA and IgY), class (e.g., IgG1, IgG2, IgG 3, IgG4, IgA1 and IgA2) or subclass.

[0066] The term “Fc region” is used to define the C-terminal region of an immunoglobulin heavy chain, which may be generated by papain digestion of an intact antibody. The Fc region may be a native sequence Fc region or a variant Fc region. The Fc region of an immunoglobulin generally comprises two constant domains, a CH2 domain and a CH3 domain, and optionally comprises a CH4 domain. Replacements of amino acid residues in the Fc portion to alter antibody effector function are known in the art (Winter, et al. U.S. Pat. Nos. 5,648,260 and 5,624,821). The Fc portion of an antibody mediates several important effector functions e.g., cytokine induction, ADCC, phagocytosis, complement dependent cytotoxicity (CDC) and half-life/clearance rate of antibody and antigen-antibody complexes. In some cases these effector functions are desirable for therapeutic antibody but in other cases might be unnecessary or even deleterious, depending on the therapeutic objectives. Certain human IgG isotypes, particularly IgG1 and IgG3, mediate ADCC and CDC via binding to FcγRs and complement C1q, respectively. Neonatal Fc receptors (FcRn) are the critical components determining the circulating half-life of antibodies. In still another embodiment at least one amino acid residue is replaced in the constant region of the antibody, for example the Fc region of the antibody, such that effector functions of the antibody are altered. The dimerization of two identical heavy chains of an immunoglobulin is mediated by the dimerization of CH3 domains and is stabilized by the disulfide bonds within the hinge region (Huber et al. Nature; 264: 415-20; Thies et al 1999 J Mol Biol; 293: 67-79.). Mutation of cysteine residues within the hinge regions to prevent heavy chain-heavy chain disulfide bonds will destabilize dimeration of CH3 domains. Residues responsible for CH3 dimerization have been identified (Dall' Acqua 1998 Biochemistry 37: 9266-73.). Therefore, it is possible to generate a monovalent half-Ig. Interestingly, these monovalent half Ig molecules have been found in nature for both IgG and IgA subclasses (Seligman 1978 Ann Immunol 129: 855-70; Biewenga et al 1983 Clin Exp Immunol 51: 395-400). The stoichiometry of FcRn: Ig Fc region has been determined to be 2:1 (West et al 0.2000 Biochemistry 39: 9698-708), and half Fc is sufficient for mediating FcRn binding (Kim et al 1994 Eur J Immunol; 24: 542-548.). Mutations to disrupt the dimerization of CH3 domain may not have greater adverse effect on its FcRn binding as the residues important for CH3 dimerization are located on the inner interface of CH3 b sheet structure, whereas the region responsible for FcRn binding is located on the outside interface of CH2-CH3 domains. However the half Ig molecule may have certain advantage in tissue penetration due to its smaller size than that of a regular antibody. In one embodiment at least one amino acid residue is replaced in the constant region of the binding proteins provided herein, for example the Fc region, such that the dimerization of the heavy chains is disrupted, resulting in half DVD Ig molecules. The anti-inflammatory activity of IgG is dependent on sialylation of the N-linked glycan of the IgG Fc fragment. The precise glycan requirements for anti-inflammatory activity has been determined, such that an appropriate IgG1 Fc fragment can be created, thereby generating a fully recombinant, sialylated IgG1 Fc with greatly enhanced potency (Anthony, R. M., et al. (2008) Science 320:373-376).

[0067] The term “antigen-binding portion” of an antibody (or simply “antibody portion”), as used herein, refers to one or more fragments of an antibody that retain the ability to specifically bind to an antigen. It has been shown that the antigen-binding function of an antibody can be performed by fragments of a full-length antibody. Such antibody embodiments may also be bispecific, dual specific, or multi-specific formats; specifically binding to two or more different antigens. Examples of binding fragments encompassed within the term “antigen-binding portion” of an antibody include (i) a Fab fragment, a monovalent fragment consisting of the VL, VH, CL and CH1 domains; (ii) a F(ab′)₂ fragment, a bivalent fragment comprising two Fab fragments linked by a disulfide bridge at the hinge region; (iii) a Fd fragment consisting of the VH and CH1 domains; (iv) a Fv fragment consisting of the VL and VH domains of a single arm of an antibody, (v) a dAb fragment (Ward et al., (1989) Nature 341:544-546, Winter et al., PCT publication WO 90/05144 A1 herein incorporated by reference), which comprises a single variable domain; and (vi) an isolated complementarity determining region (CDR). Furthermore, although the two domains of the Fv fragment, VL and VH, are coded for by separate genes, they can be joined, using recombinant methods, by a synthetic linker that enables them to be made as a single protein chain in which the VL and VH regions pair to form monovalent molecules (known as single chain Fv (scFv); see e.g., Bird et al. (1988) Science 242:423-426; and Huston et al. (1988) Proc. Natl. Acad. Sci. USA 85:5879-5883). Such single chain antibodies are also intended to be encompassed within the term “antigen-binding portion” of an antibody. Other forms of single chain antibodies, such as diabodies are also encompassed. Diabodies are bivalent, bispecific antibodies in which VH and VL domains are expressed on a single polypeptide chain, but using a linker that is too short to allow for pairing between the two domains on the same chain, thereby forcing the domains to pair with complementary domains of another chain and creating two antigen binding sites (see e.g., Holliger, P., et al. (1993) Proc. Natl. Acad. Sci. USA 90:6444-6448; Poljak, R. J., et al. (1994) Structure 2:1121-1123). Such antibody binding portions are known in the art (Kontermann and Dubel eds., Antibody Engineering (2001) Springer-Verlag. New York. 790 pp. (ISBN 3-540-41354-5). In addition single chain antibodies also include “linear antibodies” comprising a pair of tandem Fv segments (VH-CH1-VH-CH1) which, together with complementary light chain polypeptides, form a pair of antigen binding regions (Zapata et al. Protein Eng. 8(10):1057-1062 (1995); and U.S. Pat. No. 5,641,870).

[0068] The term “multivalent binding protein” is used throughout this specification to denote a binding protein comprising two or more antigen binding sites. In an embodiment, the multivalent binding protein is engineered to have the three or more antigen binding sites, and is generally not a naturally occurring antibody. The term “multispecific binding protein” refers to a binding protein capable of binding two or more related or unrelated targets. Dual variable domain (DVD) binding proteins provided herein comprise two or more antigen binding sites and are tetravalent or multivalent binding proteins. DVDs may be monospecific, i.e., capable of binding one antigen or multispecific, i.e. capable of binding two or more antigens. DVD binding proteins comprising two heavy chain DVD polypeptides and two light chain DVD polypeptides are referred to as DVD-Ig. Each half of a DVD-Ig comprises a heavy chain DVD polypeptide, and a light chain DVD polypeptide, and two antigen binding sites. Each binding site comprises a heavy chain variable domain and a light chain variable domain with a total of 6 CDRs involved in antigen binding per antigen binding site.

[0069] The term “bispecific antibody”, as used herein, refers to full-length antibodies that are generated by quadroma technology (see Milstein, C. and A. C. Cuello, Nature, 1983. 305(5934): p. 537-40), by chemical conjugation of two different monoclonal antibodies (see Staerz, U. D., et al., Nature, 1985. 314(6012): p. 628-31), or by knob-into-hole or similar approaches which introduces mutations in the Fc region (see Holliger, P., T. Prospero, and G. Winter, Proc Natl Acad Sci USA, 1993. 90(14): p. 6444-8.18), resulting in multiple different immunoglobulin species of which only one is the functional bispecific antibody. By molecular function, a bispecific antibody binds one antigen (or epitope) on one of its two binding arms (one pair of HC/LC), and binds a different antigen (or epitope) on its second arm (a different pair of HC/LC). By this definition, a bispecific antibody has two distinct antigen binding arms (in both specificity and CDR sequences), and is monovalent for each antigen it binds to.

[0070] The term “dual-specific antibody”, as used herein, refers to full-length antibodies that can bind two different antigens (or epitopes) in each of its two binding arms (a pair of HC/LC) (see PCT publication WO 02/02773). Accordingly a dual-specific binding protein has two identical antigen binding arms, with identical specificity and identical CDR sequences, and is bivalent for each antigen it binds to.

[0071] A “functional antigen binding site” of a binding protein is one that is capable of binding a target antigen. The antigen binding affinity of the antigen binding site is not necessarily as strong as the parent antibody from which the antigen binding site is derived, but the ability to bind antigen must be measurable using any one of a variety of methods known for evaluating antibody binding to an antigen. Moreover, the antigen binding affinity of each of the antigen binding sites of a multivalent antibody herein need not be quantitatively the same.

[0072] The term “cytokine” is a generic term for proteins released by one cell population, which act on another cell population as intercellular mediators. Examples of such cytokines are lymphokines, monokines, and traditional polypeptide hormones. Included among the cytokines are growth hormone such as human growth hormone, N-methionyl human growth hormone, and bovine growth hormone; parathyroid hormone; thyroxine; insulin; proinsulin; relaxin; prorelaxin; glycoprotein hormones such as follicle stimulating hormone (FSH), thyroid stimulating hormone (TSH), and luteinizing hormone (LH); hepatic growth factor; fibroblast growth factor; prolactin; placental lactogen; tumor necrosis factor-alpha and -beta; mullerian-inhibiting substance; mouse gonadotropin-associated peptide; inhibin; activin; vascular endothelial growth factor; integrin; thrombopoietin (TPO); nerve growth factors such as NGF-alpha; platelet-growth factor; placental growth factor, transforming growth factors (TGFs) such as TGF-alpha and TGF-beta; insulin-like growth factor-1 and -11; erythropoietin (EPO); osteoinductive factors; interferons such as interferon-alpha, -beta and -gamma colony stimulating factors (CSFs) such as macrophage-CSF (M-CSF); granulocyte macrophage-CSF (GM-CSF); and granulocyte-CSF (G-CSF); interleukins (ILs) such as IL-1, IL-2, IL-3, IL-4, IL-5, IL-6, IL-7, IL-8, IL-9, IL-10, IL-11, IL-12, IL-13, IL-15, IL-18, IL-21, IL-22, IL-23, IL-33; a tumor necrosis factor such as TNF-alpha or TNF-beta; and other polypeptide factors including LIF and kit ligand (KL). As used herein, the term cytokine includes proteins from natural sources or from recombinant cell culture and biologically active equivalents of the native sequence cytokines.

[0073] The term “linker” is used to denote polypeptides comprising two or more amino acid residues joined by peptide bonds and are used to link one or more antigen binding portions. Such linker polypeptides are well known in the art (see e.g., Holliger, P., et al. (1993) Proc. Natl. Acad. Sci. USA 90:6444-6448; Poljak, R. J., et al. (1994) Structure 2:1121-1123). Exemplary linkers include, but are not limited to, AKTTPKLEEGEFSEAR (SEQ ID NO: 1); AKTTPKLEEGEFSEARV (SEQ ID NO: 2); AKTTPKLGG (SEQ ID NO: 3); SAKTTPKLGG (SEQ ID NO: 4); SAKTTP (SEQ ID NO: 5); RADAAP (SEQ ID NO: 6); RADAAPTVS (SEQ ID NO: 7); RADAAAAGGPGS (SEQ ID NO: 8); RADAAAA(G₄S)₄ (SEQ ID NO: 9), SAKTTPKLEEGEFSEARV (SEQ ID NO: 10); ADAAP (SEQ ID NO: 11); ADAAPTVSIFPP (SEQ ID NO: 12); TVAAP (SEQ ID NO: 13); TVAAPSVFIFPP (SEQ ID NO: 14); QPKAAP (SEQ ID NO: 15); QPKAAPSVTLFPP (SEQ ID NO: 16); AKTTPP (SEQ ID NO: 17); AKTTPPSVTPLAP (SEQ ID NO: 18); AKTTAP (SEQ ID NO: 19); AKTTAPSVYPLAP (SEQ ID NO: 20); ASTKGP (SEQ ID NO: 21); ASTKGPSVFPLAP (SEQ ID NO: 22), GGGGSGGGGSGGGGS (SEQ ID NO: 23); GENKVEYAPALMALS (SEQ ID NO: 24); GPAKELTPLKEAKVS (SEQ ID NO: 25); and GHEAAAVMQVQYPAS (SEQ ID NO: 26).

[0074] An “immunoglobulin constant domain” refers to a heavy or light chain constant domain. Human IgG heavy chain and light chain constant domain amino acid sequences are known in the art.

[0075] The term “monoclonal antibody” or “mAb” as used herein refers to an antibody obtained from a population of substantially homogeneous antibodies, i.e., the individual antibodies comprising the population are identical except for possible naturally occurring mutations that may be present in minor amounts. Monoclonal antibodies are highly specific, being directed against a single antigen. Furthermore, in contrast to polyclonal antibody preparations that typically include different antibodies directed against different determinants (epitopes), each mAb is directed against a single determinant on the antigen. The modifier “monoclonal” is not to be construed as requiring production of the antibody by any particular method.

[0076] The term “human antibody”, as used herein, is intended to include antibodies having variable and constant regions derived from human germline immunoglobulin sequences. The human antibodies provided herein may include amino acid residues not encoded by human germline immunoglobulin sequences (e.g., mutations introduced by random or site-specific mutagenesis in vitro or by somatic mutation in vivo), for example in the CDRs and in particular CDR3. However, the term “human antibody”, as used herein, is not intended to include antibodies in which CDR sequences derived from the germline of another mammalian species, such as a mouse, have been grafted onto human framework sequences.

[0077] The term “recombinant human antibody”, as used herein, is intended to include all human antibodies that are prepared, expressed, created or isolated by recombinant means, such as antibodies expressed using a recombinant expression vector transfected into a host cell (described further in Section II C, below), antibodies isolated from a recombinant, combinatorial human antibody library (Hoogenboom H. R. (1997) TIB Tech. 15:62-70; Azzazy H., and Highsmith W. E. (2002) Clin. Biochem. 35:425-445; Gavilondo J. V., and Larrick J. W. (2002) BioTechniques 29:128-145; Hoogenboom H., and Chames P. (2000) Immunology Today 21:371-378), antibodies isolated from an animal (e.g., a mouse) that is transgenic for human immunoglobulin genes (see, Taylor, L. D., et al. (1992) Nucl. Acids Res. 20:6287-6295; Kellermann S-A. and Green L. L. (2002) Current Opinion in Biotechnology 13:593-597; Little M. et al. (2000) Immunology Today 21:364-370) or antibodies prepared, expressed, created or isolated by any other means that involves splicing of human immunoglobulin gene sequences to other DNA sequences. Such recombinant human antibodies have variable and constant regions derived from human germline immunoglobulin sequences. In certain embodiments, however, such recombinant human antibodies are subjected to in vitro mutagenesis (or, when an animal transgenic for human Ig sequences is used, in vivo somatic mutagenesis) and thus the amino acid sequences of the VH and VL regions of the recombinant antibodies are sequences that, while derived from and related to human germline VH and VL sequences, may not naturally exist within the human antibody germline repertoire in vivo.

[0078] An “affinity matured” antibody is an antibody with one or more alterations in one or more CDRs thereof which result an improvement in the affinity of the antibody for antigen, compared to a parent antibody which does not possess those alteration(s). Exemplary affinity matured antibodies will have nanomolar or even picomolar affinities for the target antigen. Affinity matured antibodies are produced by procedures known in the art. Marks et al. BidlTechnology 10:779-783 (1992) describes affinity maturation by VH and VL domain shuffling. Random mutagenesis of CDR and/or framework residues is described by: Barbas et al. Proc Nat. Acad. Sci, USA 91:3809-3813 (1994); Schier et al. Gene 169:147-155 (1995); Yelton et al. J. Immunol. 155:1994-2004 (1995); Jackson et al., J. Immunol. 154(7):3310-9 (1995); Hawkins et al, J. Mol. Biol. 226:889-896 (1992) and selective mutation at selective mutagenesis positions, contact or hypermutation positions with an activity enhancing amino acid residue as described in U.S. Pat. No. 6,914,128B1.

[0079] The term “chimeric antibody” refers to antibodies which comprise heavy and light chain variable region sequences from one species and constant region sequences from another species, such as antibodies having murine heavy and light chain variable regions linked to human constant regions.

[0080] The term “CDR-grafted antibody” refers to antibodies which comprise heavy and light chain variable region sequences from one species but in which the sequences of one or more of the CDR regions of VH and/or VL are replaced with CDR sequences of another species, such as antibodies having murine heavy and light chain variable regions in which one or more of the murine CDRs (e.g., CDR3) has been replaced with human CDR sequences.

[0081] The term “humanized antibody” refers to antibodies which comprise heavy and light chain variable region sequences from a non-human species (e.g., a mouse) but in which at least a portion of the VH and/or VL sequence has been altered to be more “human-like”, i.e., more similar to human germline variable sequences. One type of humanized antibody is a CDR-grafted antibody, in which human CDR sequences are introduced into non-human VH and VL sequences to replace the corresponding nonhuman CDR sequences. Also “humanized antibody” is an antibody or a variant, derivative, analog or fragment thereof which immunospecifically binds to an antigen of interest and which comprises a framework (FR) region having substantially the amino acid sequence of a human antibody and a complementary determining region (CDR) having substantially the amino acid sequence of a non-human antibody. As used herein, the term “substantially” in the context of a CDR refers to a CDR having an amino acid sequence at least 80%, at least 85%, at least 90%, at least 95%, at least 98% or at least 99% identical to the amino acid sequence of a non-human antibody CDR. A humanized antibody comprises substantially all of at least one, and typically two, variable domains (Fab, Fab′, F(ab′)2, FabC, Fv) in which all or substantially all of the CDR regions correspond to those of a non-human immunoglobulin (i.e., donor antibody) and all or substantially all of the framework regions are those of a human immunoglobulin consensus sequence. In an embodiment, a humanized antibody also comprises at least a portion of an immunoglobulin constant region (Fc), typically that of a human immunoglobulin. In some embodiments, a humanized antibody contains both the light chain as well as at least the variable domain of a heavy chain. The antibody also may include the CH1, hinge, CH₂, CH3, and CH4 regions of the heavy chain. In some embodiments, a humanized antibody only contains a humanized light chain. In some embodiments, a humanized antibody only contains a humanized heavy chain. In specific embodiments, a humanized antibody only contains a humanized variable domain of a light chain and/or humanized heavy chain.

[0082] The terms “Kabat numbering”, “Kabat definitions” and “Kabat labeling” are used interchangeably herein. These terms, which are recognized in the art, refer to a system of numbering amino acid residues which are more variable (i.e. hypervariable) than other amino acid residues in the heavy and light chain variable regions of an antibody, or an antigen binding portion thereof (Kabat et al. (1971) Ann. NY Acad, Sci. 190:382-391 and, Kabat, E. A., et al. (1991) Sequences of Proteins of Immunological Interest, Fifth Edition, U.S. Department of Health and Human Services, NIH Publication No. 91-3242). For the heavy chain variable region, the hypervariable region ranges from amino acid positions 31 to 35 for CDR1, amino acid positions 50 to 65 for CDR2, and amino acid positions 95 to 102 for CDR3. For the light chain variable region, the hypervariable region ranges from amino acid positions 24 to 34 for CDR1, amino acid positions 50 to 56 for CDR2, and amino acid positions 89 to 97 for CDR3.

[0083] As used herein, the term “CDR” refers to the complementarity determining region within antibody variable sequences. There are three CDRs in each of the variable regions of the heavy chain and the light chain, which are designated CDR1, CDR2 and CDR3, for each of the variable regions. The term “CDR set” as used herein refers to a group of three CDRs that occur in a single variable region capable of binding the antigen. The exact boundaries of these CDRs have been defined differently according to different systems. The system described by Kabat (Kabat et al., Sequences of Proteins of Immunological Interest (National Institutes of Health, Bethesda, Md. (1987) and (1991)) not only provides an unambiguous residue numbering system applicable to any variable region of an antibody, but also provides precise residue boundaries defining the three CDRs. These CDRs may be referred to as Kabat CDRs. Chothia and coworkers (Chothia &Lesk, J. Mol. Biol. 196:901-917 (1987) and Chothia et al., Nature 342:877-883 (1989)) found that certain sub-portions within Kabat CDRs adopt nearly identical peptide backbone conformations, despite having great diversity at the level of amino acid sequence. These sub-portions were designated as L1, L2 and L3 or H1, H2 and H3 where the “L” and the “H” designates the light chain and the heavy chains regions, respectively. These regions may be referred to as Chothia CDRs, which have boundaries that overlap with Kabat CDRs. Other boundaries defining CDRs overlapping with the Kabat CDRs have been described by Padlan (FASEB J. 9:133-139 (1995)) and MacCallum (J Mol Biol 262(5):732-45 (1996)). Still other CDR boundary definitions may not strictly follow one of the herein systems, but will nonetheless overlap with the Kabat CDRs, although they may be shortened or lengthened in light of prediction or experimental findings that particular residues or groups of residues or even entire CDRs do not significantly impact antigen binding. The methods used herein may utilize CDRs defined according to any of these systems, although certain embodiments use Kabat or Chothia defined CDRs.

[0084] As used herein, the term “framework” or “framework sequence” refers to the remaining sequences of a variable region minus the CDRs. Because the exact definition of a CDR sequence can be determined by different systems, the meaning of a framework sequence is subject to correspondingly different interpretations. The six CDRs (CDR-L1, -L2, and -L3 of light chain and CDR-H1, -H2, and -H3 of heavy chain) also divide the framework regions on the light chain and the heavy chain into four sub-regions (FR1, FR2, FR3 and FR4) on each chain, in which CDR1 is positioned between FR1 and FR2, CDR2 between FR2 and FR3, and CDR3 between FR3 and FR4. Without specifying the particular sub-regions as FR1, FR2, FR3 or FR4, a framework region, as referred by others, represents the combined FR's within the variable region of a single, naturally occurring immunoglobulin chain. As used herein, a FR represents one of the four sub-regions, and FRs represents two or more of the four sub-regions constituting a framework region.

[0085] As used herein, the term “germline antibody gene” or “gene fragment” refers to an immunoglobulin sequence encoded by non-lymphoid cells that have not undergone the maturation process that leads to genetic rearrangement and mutation for expression of a particular immunoglobulin. (See, e.g., Shapiro et al., Crit. Rev. Immunol 22(3): 183-200 (2002); Marchalonis et al., Adv Exp Med. Biol. 484:13-30 (2001)). One of the advantages provided by various embodiments stems from the recognition that germline antibody genes are more likely than mature antibody genes to conserve essential amino acid sequence structures characteristic of individuals in the species, hence less likely to be recognized as from a foreign source when used therapeutically in that species.

[0086] As used herein, the term “neutralizing” refers to counteracting the biological activity of an antigen when a binding protein specifically binds the antigen. In an embodiment, the neutralizing binding protein binds the cytokine and reduces its biologically activity by at least about 20%, 40%, 60%, 80%, 85% or more.

[0087] The term “activity” includes activities such as the binding specificity and affinity of a DVD-Ig for two or more antigens.

[0088] The term “epitope” includes any polypeptide determinant capable of specific binding to an immunoglobulin or T-cell receptor. In certain embodiments, epitope determinants include chemically active surface groupings of molecules such as amino acids, sugar side chains, phosphoryl, or sulfonyl, and, in certain embodiments, may have specific three dimensional structural characteristics, and/or specific charge characteristics. An epitope is a region of an antigen that is bound by an antibody. In certain embodiments, an antibody is said to specifically bind an antigen when it recognizes its target antigen in a complex mixture of proteins and/or macromolecules. Antibodies are said to “bind to the same epitope” if the antibodies cross-compete (one prevents the binding or modulating effect of the other). In addition structural definitions of epitopes (overlapping, similar, identical) are informative, but functional definitions are often more relevant as they encompass structural (binding) and functional (modulation, competition) parameters.

[0089] The term “surface plasmon resonance”, as used herein, refers to an optical phenomenon that allows for the analysis of real-time biospecific interactions by detection of alterations in protein concentrations within a biosensor matrix, for example using the BIAcore® system (BIAcore International AB, a GE Healthcare company, Uppsala, Sweden and Piscataway, N.J.). For further descriptions, see Jonsson, U., et al. (1993) Ann. Biol. Clin. 51:19-26; Jonsson, U., et al. (1991) Biotechniques 11:620-627; Johnsson, B., et al. (1995) J. Mol. Recognit. 8:125-131; and Johnnson, B., et al. (1991) Anal. Biochem. 198:268-277.

[0090] The term “Kₒₙ”, as used herein, is intended to refer to the on rate constant for association of a binding protein (e.g., an antibody) to the antigen to form the, e.g., antibody/antigen complex as is known in the art. The “Kon” also is known by the terms “association rate constant”, or “ka”, as used interchangeably herein. This value indicating the binding rate of an antibody to its target antigen or the rate of complex formation between an antibody and antigen also is shown by the equation below:

Antibody(“Ab”)+Antigen(“Ag”)→Ab−Ag.

[0091] The term “K_{off}”, as used herein, is intended to refer to the off rate constant for dissociation, or “dissociation rate constant”, of a binding protein (e.g., an antibody) from the, e.g., antibody/antigen complex as is known in the art. This value indicates the dissociation rate of an antibody from its target antigen or separation of Ab−Ag complex over time into free antibody and antigen as shown by the equation below:

Ab+Ag−Ab−Ag.

[0092] The term “K_{D}”, as used herein, is intended to refer to the “equilibrium dissociation constant”, and refers to the value obtained in a titration measurement at equilibrium, or by dividing the dissociation rate constant (koff) by the association rate constant (kon). The association rate constant, the dissociation rate constant and the equilibrium dissociation constant are used to represent the binding affinity of an antibody to an antigen. Methods for determining association and dissociation rate constants are well known in the art. Using fluorescence-based techniques offers high sensitivity and the ability to examine samples in physiological buffers at equilibrium. Other experimental approaches and instruments such as a BIAcore® (biomolecular interaction analysis) assay can be used (e.g., instrument available from BIAcore International AB, a GE Healthcare company, Uppsala, Sweden). Additionally, a KinExA® (Kinetic Exclusion Assay) assay, available from Sapidyne Instruments (Boise, Id.) can also be used.

[0093] “Label” and “detectable label” mean a moiety attached to a specific binding partner, such as an antibody or an analyte, e.g., to render the reaction between members of a specific binding pair, such as an antibody and an analyte, detectable, and the specific binding partner, e.g., antibody or analyte, so labeled is referred to as “detectably labeled.” Thus, the term “labeled binding protein” as used herein, refers to a protein with a label incorporated that provides for the identification of the binding protein. In an embodiment, the label is a detectable marker that can produce a signal that is detectable by visual or instrumental means, e.g., incorporation of a radiolabeled amino acid or attachment to a polypeptide of biotinyl moieties that can be detected by marked avidin (e.g., streptavidin containing a fluorescent marker or enzymatic activity that can be detected by optical or colorimetric methods). Examples of labels for polypeptides include, but are not limited to, the following: radioisotopes or radionuclides (e.g., ³H, ¹⁴C, ³⁵S, ⁹⁰Y, ⁹⁹Tc, ¹¹¹In, ¹²⁵I, ¹³¹I, ¹⁷⁷Lu, ¹⁶⁶Ho, or ¹⁵³Sm); chromogens, fluorescent labels (e.g., FITC, rhodamine, lanthanide phosphors), enzymatic labels (e.g., horseradish peroxidase, luciferase, alkaline phosphatase); chemiluminescent markers; biotinyl groups; predetermined polypeptide epitopes recognized by a secondary reporter (e.g., leucine zipper pair sequences, binding sites for secondary antibodies, metal binding domains, epitope tags); and magnetic agents, such as gadolinium chelates. Representative examples of labels commonly employed for immunoassays include moieties that produce light, e.g., acridinium compounds, and moieties that produce fluorescence, e.g., fluorescein. Other labels are described herein. In this regard, the moiety itself may not be detectably labeled but may become detectable upon reaction with yet another moiety. Use of “detectably labeled” is intended to encompass the latter type of detectable labeling.

[0094] The term “conjugate” refers to a binding protein, such as an antibody, chemically linked to a second chemical moiety, such as a therapeutic or cytotoxic agent. The term “agent” is used herein to denote a chemical compound, a mixture of chemical compounds, a biological macromolecule, or an extract made from biological materials. In an embodiment, the therapeutic or cytotoxic agents include, but are not limited to, pertussis toxin, taxol, cytochalasin B, gramicidin D, ethidium bromide, emetine, mitomycin, etoposide, tenoposide, vincristine, vinblastine, colchicin, doxorubicin, daunorubicin, dihydroxy anthracin dione, mitoxantrone, mithramycin, actinomycin D,l-dehydrotestosterone, glucocorticoids, procaine, tetracaine, lidocaine, propranolol, and puromycin and analogs or homologs thereof. When employed in the context of an immunoassay, the conjugate antibody may be a detectably labeled antibody used as the detection antibody.

[0095] The terms “crystal” and “crystallized” as used herein, refer to a binding protein (e.g., an antibody), or antigen binding portion thereof, that exists in the form of a crystal. Crystals are one form of the solid state of matter, which is distinct from other forms such as the amorphous solid state or the liquid crystalline state. Crystals are composed of regular, repeating, three-dimensional arrays of atoms, ions, molecules (e.g., proteins such as antibodies), or molecular assemblies (e.g., antigen/antibody complexes). These three-dimensional arrays are arranged according to specific mathematical relationships that are well-understood in the field. The fundamental unit, or building block, that is repeated in a crystal is called the asymmetric unit. Repetition of the asymmetric unit in an arrangement that conforms to a given, well-defined crystallographic symmetry provides the “unit cell” of the crystal. Repetition of the unit cell by regular translations in all three dimensions provides the crystal. See Giege, R. and Ducruix, A. Barrett, CRYSTALLIZATION OF NUCLEIC ACIDS AND PROTEINS, A PRACTICAL APPROACH, 2nd ea., pp. 20 1-16, Oxford University Press, New York, N.Y., (1999).”

[0096] The term “polynucleotide” means a polymeric form of two or more nucleotides, either ribonucleotides or deoxynucleotides or a modified form of either type of nucleotide. The term includes single and double stranded forms of DNA.

[0097] The term “isolated polynucleotide” shall mean a polynucleotide (e.g., of genomic, cDNA, or synthetic origin, or some combination thereof) that, by virtue of its origin, the “isolated polynucleotide” is not associated with all or a portion of a polynucleotide with which the “isolated polynucleotide” is found in nature; is operably linked to a polynucleotide that it is not linked to in nature; or does not occur in nature as part of a larger sequence.

[0098] The term “vector”, is intended to refer to a nucleic acid molecule capable of transporting another nucleic acid to which it has been linked. One type of vector is a “plasmid”, which refers to a circular double stranded DNA loop into which additional DNA segments may be ligated. Another type of vector is a viral vector, wherein additional DNA segments may be ligated into the viral genome. Certain vectors are capable of autonomous replication in a host cell into which they are introduced (e.g., bacterial vectors having a bacterial origin of replication and episomal mammalian vectors). Other vectors (e.g., non-episomal mammalian vectors) can be integrated into the genome of a host cell upon introduction into the host cell, and thereby are replicated along with the host genome. Moreover, certain vectors are capable of directing the expression of genes to which they are operatively linked. Such vectors are referred to herein as “recombinant expression vectors” (or simply, “expression vectors”). In general, expression vectors of utility in recombinant DNA techniques are often in the form of plasmids. In the present specification, “plasmid” and “vector” may be used interchangeably as the plasmid is the most commonly used form of vector. However, other forms of expression vectors are also included, such as viral vectors (e.g., replication defective retroviruses, adenoviruses and adeno-associated viruses), which serve equivalent functions.

[0099] The term “operably linked” refers to a juxtaposition wherein the components described are in a relationship permitting them to function in their intended manner. A control sequence “operably linked” to a coding sequence is ligated in such a way that expression of the coding sequence is achieved under conditions compatible with the control sequences. “Operably linked” sequences include both expression control sequences that are contiguous with the gene of interest and expression control sequences that act in trans or at a distance to control the gene of interest. The term “expression control sequence” as used herein refers to polynucleotide sequences which are necessary to effect the expression and processing of coding sequences to which they are ligated. Expression control sequences include appropriate transcription initiation, termination, promoter and enhancer sequences; efficient RNA processing signals such as splicing and polyadenylation signals; sequences that stabilize cytoplasmic mRNA; sequences that enhance translation efficiency (i.e., Kozak consensus sequence); sequences that enhance protein stability; and when desired, sequences that enhance protein secretion. The nature of such control sequences differs depending upon the host organism; in prokaryotes, such control sequences generally include promoter, ribosomal binding site, and transcription termination sequence; in eukaryotes, generally, such control sequences include promoters and transcription termination sequence. The term “control sequences” is intended to include components whose presence is essential for expression and processing, and can also include additional components whose presence is advantageous, for example, leader sequences and fusion partner sequences.

[0100] “Transformation”, refers to any process by which exogenous DNA enters a host cell. Transformation may occur under natural or artificial conditions using various methods well known in the art. Transformation may rely on any known method for the insertion of foreign nucleic acid sequences into a prokaryotic or eukaryotic host cell. The method is selected based on the host cell being transformed and may include, but is not limited to, viral infection, electroporation, lipofection, and particle bombardment. Such “transformed” cells include stably transformed cells in which the inserted DNA is capable of replication either as an autonomously replicating plasmid or as part of the host chromosome. They also include cells which transiently express the inserted DNA or RNA for limited periods of time.

[0101] The term “recombinant host cell” (or simply “host cell”), is intended to refer to a cell into which exogenous DNA has been introduced. In an embodiment, the host cell comprises two more more (e.g., multiple) nucleic acids encoding antibodies, such as the host cells described in U.S. Pat. No. 7,262,028, for example. It should be understood that such terms are intended to refer not only to the particular subject cell, but to the progeny of such a cell. Because certain modifications may occur in succeeding generations due to either mutation or environmental influences, such progeny may not, in fact, be identical to the parent cell, but are still included within the scope of the term “host cell” as used herein. In an embodiment, host cells include prokaryotic and eukaryotic cells selected from any of the Kingdoms of life. In another embodiment, eukaryotic cells include protist, fungal, plant and animal cells. In another embodiment, host cells include but are not limited to the prokaryotic cell line E. coli; mammalian cell lines CHO, HEK 293, COS, NSO, SP2 and PER.C6; the insect cell line Sf9; and the fungal cell Saccharomyces cerevisiae.

[0102] Standard techniques may be used for recombinant DNA, oligonucleotide synthesis, and tissue culture and transformation (e.g., electroporation, lipofection). Enzymatic reactions and purification techniques may be performed according to manufacturer's specifications or as commonly accomplished in the art or as described herein. The foregoing techniques and procedures may be generally performed according to conventional methods well known in the art and as described in various general and more specific references that are cited and discussed throughout the present specification. See e.g., Sambrook et al. MOLECULAR CLONING: A LABORATORY MANUAL (2d ed., Cold Spring Harbor Laboratory Press, Cold Spring Harbor, N.Y. (1989)), which is incorporated herein by reference for any purpose.

[0103] “Transgenic organism”, as known in the art, refers to an organism having cells that contain a transgene, wherein the transgene introduced into the organism (or an ancestor of the organism) expresses a polypeptide not naturally expressed in the organism. A “transgene” is a DNA construct, which is stably and operably integrated into the genome of a cell from which a transgenic organism develops, directing the expression of an encoded gene product in one or more cell types or tissues of the transgenic organism.

[0104] The term “regulate” and “modulate” are used interchangeably, and, as used herein, refers to a change or an alteration in the activity of a molecule of interest (e.g., the biological activity of a cytokine). Modulation may be an increase or a decrease in the magnitude of a certain activity or function of the molecule of interest. Exemplary activities and functions of a molecule include, but are not limited to, binding characteristics, enzymatic activity, cell receptor activation, and signal transduction.

[0105] Correspondingly, the term “modulator” is a compound capable of changing or altering an activity or function of a molecule of interest (e.g., the biological activity of a cytokine). For example, a modulator may cause an increase or decrease in the magnitude of a certain activity or function of a molecule compared to the magnitude of the activity or function observed in the absence of the modulator. In certain embodiments, a modulator is an inhibitor, which decreases the magnitude of at least one activity or function of a molecule. Exemplary inhibitors include, but are not limited to, proteins, peptides, antibodies, peptibodies, carbohydrates or small organic molecules. Peptibodies are described, e.g., in WO01/83525.

[0106] The term “agonist”, refers to a modulator that, when contacted with a molecule of interest, causes an increase in the magnitude of a certain activity or function of the molecule compared to the magnitude of the activity or function observed in the absence of the agonist. Particular agonists of interest may include, but are not limited to, polypeptides, nucleic acids, carbohydrates, or any other molecules that bind to the antigen.

[0107] The term “antagonist” or “inhibitor”, refer to a modulator that, when contacted with a molecule of interest causes a decrease in the magnitude of a certain activity or function of the molecule compared to the magnitude of the activity or function observed in the absence of the antagonist. Particular antagonists of interest include those that block or modulate the biological or immunological activity of the antigen. Antagonists and inhibitors of antigens may include, but are not limited to, proteins, nucleic acids, carbohydrates, or any other molecules, which bind to the antigen.

[0108] As used herein, the term “effective amount” refers to the amount of a therapy which is sufficient to reduce or ameliorate the severity and/or duration of a disorder or one or more symptoms thereof, prevent the advancement of a disorder, cause regression of a disorder, prevent the recurrence, development, onset or progression of one or more symptoms associated with a disorder, detect a disorder, or enhance or improve the prophylactic or therapeutic effect(s) of another therapy (e.g., prophylactic or therapeutic agent).

[0109] “Patient” and “subject” may be used interchangeably herein to refer to an animal, such as a mammal, including a primate (for example, a human, a monkey, and a chimpanzee), a non-primate (for example, a cow, a pig, a camel, a llama, a horse, a goat, a rabbit, a sheep, a hamster, a guinea pig, a cat, a dog, a rat, a mouse, a whale), a bird (e.g., a duck or a goose), and a shark. Preferably, the patient or subject is a human, such as a human being treated or assessed for a disease, disorder or condition, a human at risk for a disease, disorder or condition, a human having a disease, disorder or condition, and/or human being treated for a disease, disorder or condition.

[0110] The term “sample”, as used herein, is used in its broadest sense. A “biological sample”, as used herein, includes, but is not limited to, any quantity of a substance from a living thing or formerly living thing. Such living things include, but are not limited to, humans, mice, rats, monkeys, dogs, rabbits and other animals. Such substances include, but are not limited to, blood, (e.g., whole blood), plasma, serum, urine, amniotic fluid, synovial fluid, endothelial cells, leukocytes, monocytes, other cells, organs, tissues, bone marrow, lymph nodes and spleen.

[0111] “Component,” “components,” and “at least one component,” refer generally to a capture antibody, a detection or conjugate antibody, a control, a calibrator, a series of calibrators, a sensitivity panel, a container, a buffer, a diluent, a salt, an enzyme, a co-factor for an enzyme, a detection reagent, a pretreatment reagent/solution, a substrate (e.g., as a solution), a stop solution, and the like that can be included in a kit for assay of a test sample, such as a patient urine, serum or plasma sample, in accordance with the methods described herein and other methods known in the art. Thus, in the context of the present disclosure, “at least one component,” “component,” and “components” can include a polypeptide or other analyte as above, such as a composition comprising an analyte such as polypeptide, which is optionally immobilized on a solid support, such as by binding to an anti-analyte (e.g., anti-polypeptide) antibody. Some components can be in solution or lyophilized for reconstitution for use in an assay.

[0112] “Control” refers to a composition known to not analyte (“negative control”) or to contain analyte (“positive control”). A positive control can comprise a known concentration of analyte. “Control,” “positive control,” and “calibrator” may be used interchangeably herein to refer to a composition comprising a known concentration of analyte. A “positive control” can be used to establish assay performance characteristics and is a useful indicator of the integrity of reagents (e.g., analytes).

[0113] “Predetermined cutoff” and “predetermined level” refer generally to an assay cutoff value that is used to assess diagnostic/prognostic/therapeutic efficacy results by comparing the assay results against the predetermined cutoff/level, where the predetermined cutoff/level already has been linked or associated with various clinical parameters (e.g., severity of disease, progression/nonprogression/improvement, etc.). While the present disclosure may provide exemplary predetermined levels, it is well-known that cutoff values may vary depending on the nature of the immunoassay (e.g., antibodies employed, etc.). It further is well within the ordinary skill of one in the art to adapt the disclosure herein for other immunoassays to obtain immunoassay-specific cutoff values for those other immunoassays based on this disclosure. Whereas the precise value of the predetermined cutoff/level may vary between assays, correlations as described herein (if any) should be generally applicable.

[0114] “Pretreatment reagent,” e.g., lysis, precipitation and/or solubilization reagent, as used in a diagnostic assay as described herein is one that lyses any cells and/or solubilizes any analyte that is/are present in a test sample. Pretreatment is not necessary for all samples, as described further herein. Among other things, solubilizing the analyte (e.g., polypeptide of interest) may entail release of the analyte from any endogenous binding proteins present in the sample. A pretreatment reagent may be homogeneous (not requiring a separation step) or heterogeneous (requiring a separation step). With use of a heterogeneous pretreatment reagent there is removal of any precipitated analyte binding proteins from the test sample prior to proceeding to the next step of the assay.

[0115] “Quality control reagents” in the context of immunoassays and kits described herein, include, but are not limited to, calibrators, controls, and sensitivity panels. A “calibrator” or “standard” typically is used (e.g., one or more, such as a plurality) in order to establish calibration (standard) curves for interpolation of the concentration of an analyte, such as an antibody or an analyte. Alternatively, a single calibrator, which is near a predetermined positive/negative cutoff, can be used. Multiple calibrators (i.e., more than one calibrator or a varying amount of calibrator(s)) can be used in conjunction so as to comprise a “sensitivity panel.”

[0116] “Risk” refers to the possibility or probability of a particular event occurring either presently or at some point in the future. “Risk stratification” refers to an array of known clinical risk factors that allows physicians to classify patients into a low, moderate, high or highest risk of developing a particular disease, disorder or condition.

[0117] “Specific” and “specificity” in the context of an interaction between members of a specific binding pair (e.g., an antigen (or fragment thereof) and an antibody (or antigenically reactive fragment thereof)) refer to the selective reactivity of the interaction. The phrase “specifically binds to” and analogous phrases refer to the ability of antibodies (or antigenically reactive fragments thereof) to bind specifically to analyte (or a fragment thereof) and not bind specifically to other entities.

[0118] “Specific binding partner” is a member of a specific binding pair. A specific binding pair comprises two different molecules, which specifically bind to each other through chemical or physical means. Therefore, in addition to antigen and antibody specific binding pairs of common immunoassays, other specific binding pairs can include biotin and avidin (or streptavidin), carbohydrates and lectins, complementary nucleotide sequences, effector and receptor molecules, cofactors and enzymes, enzyme inhibitors and enzymes, and the like. Furthermore, specific binding pairs can include members that are analogs of the original specific binding members, for example, an analyte-analog. Immunoreactive specific binding members include antigens, antigen fragments, and antibodies, including monoclonal and polyclonal antibodies as well as complexes, fragments, and variants (including fragments of variants) thereof, whether isolated or recombinantly produced.

[0119] “Variant” as used herein means a polypeptide that differs from a given polypeptide (e.g., IL-18, BNP, NGAL or HIV polypeptide or anti-polypeptide antibody) in amino acid sequence by the addition (e.g., insertion), deletion, or conservative substitution of amino acids, but that retains the biological activity of the given polypeptide (e.g., a variant IL-18 can compete with anti-IL-18 antibody for binding to IL-18). A conservative substitution of an amino acid, i.e., replacing an amino acid with a different amino acid of similar properties (e.g., hydrophilicity and degree and distribution of charged regions) is recognized in the art as typically involving a minor change. These minor changes can be identified, in part, by considering the hydropathic index of amino acids, as understood in the art (see, e.g., Kyte et al., J. Mol. Biol. 157: 105-132 (1982)). The hydropathic index of an amino acid is based on a consideration of its hydrophobicity and charge. It is known in the art that amino acids of similar hydropathic indexes can be substituted and still retain protein function. In one aspect, amino acids having hydropathic indexes of ±2 are substituted. The hydrophilicity of amino acids also can be used to reveal substitutions that would result in proteins retaining biological function. A consideration of the hydrophilicity of amino acids in the context of a peptide permits calculation of the greatest local average hydrophilicity of that peptide, a useful measure that has been reported to correlate well with antigenicity and immunogenicity (see, e.g., U.S. Pat. No. 4,554,101, which is incorporated herein by reference). Substitution of amino acids having similar hydrophilicity values can result in peptides retaining biological activity, for example immunogenicity, as is understood in the art. In one aspect, substitutions are performed with amino acids having hydrophilicity values within ±2 of each other. Both the hydrophobicity index and the hydrophilicity value of amino acids are influenced by the particular side chain of that amino acid. Consistent with that observation, amino acid substitutions that are compatible with biological function are understood to depend on the relative similarity of the amino acids, and particularly the side chains of those amino acids, as revealed by the hydrophobicity, hydrophilicity, charge, size, and other properties. “Variant” also can be used to describe a polypeptide or fragment thereof that has been differentially processed, such as by proteolysis, phosphorylation, or other post-translational modification, yet retains its biological activity or antigen reactivity, e.g., the ability to bind to IL-18. Use of “variant” herein is intended to encompass fragments of a variant unless otherwise contradicted by context.

### I. Generation of DVD Binding Protein

[0120] Dual Variable Domain binding proteins capable of binding one or more targets and methods of making the same. In an embodiment, the binding protein comprises a polypeptide chain, wherein said polypeptide chain comprises VD1-(X1)n-VD2-C-(X2)n, wherein VD1 is a first variable domain, VD2 is a second variable domain, C is a constant domain, X1 represents an amino acid or polypeptide, X2 represents an Fc region and n is 0 or 1 are provided. The binding protein can be generated using various techniques. Expression vectors, host cell and methods of generating the binding protein are provided.

### A. Generation of Parent Monoclonal Antibodies

[0121] The variable domains of the DVD binding protein can be obtained from parent antibodies, including polyclonal and mAbs capable of binding antigens of interest. These antibodies may be naturally occurring or may be generated by recombinant technology.

[0122] MAbs can be prepared using a wide variety of techniques known in the art including the use of hybridoma, recombinant, and phage display technologies, or a combination thereof. For example, mAbs can be produced using hybridoma techniques including those known in the art and taught, for example, in Harlow et al., Antibodies: A Laboratory Manual, (Cold Spring Harbor Laboratory Press, 2nd ed. 1988); Hammerling, et al., in: Monoclonal Antibodies and T-Cell Hybridomas 563-681 (Elsevier, N.Y., 1981) (said references incorporated by reference in their entireties). The term “monoclonal antibody” as used herein is not limited to antibodies produced through hybridoma technology. The term “monoclonal antibody” refers to an antibody that is derived from a single clone, including any eukaryotic, prokaryotic, or phage clone, and not the method by which it is produced. Hybridomas are selected, cloned and further screened for desirable characteristics, including robust hybridoma growth, high antibody production and desirable antibody characteristics, as discussed in Example 1 below. Hybridomas may be cultured and expanded in vivo in syngeneic animals, in animals that lack an immune system, e.g., nude mice, or in cell culture in vitro. Methods of selecting, cloning and expanding hybridomas are well known to those of ordinary skill in the art. In a particular embodiment, the hybridomas are mouse hybridomas. In another embodiment, the hybridomas are produced in a non-human, non-mouse species such as rats, sheep, pigs, goats, cattle or horses. In another embodiment, the hybridomas are human hybridomas, in which a human non-secretory myeloma is fused with a human cell expressing an antibody capable of binding a specific antigen.

[0123] Recombinant mAbs are also generated from single, isolated lymphocytes using a procedure referred to in the art as the selected lymphocyte antibody method (SLAM), as described in U.S. Pat. No. 5,627,052, PCT Publication WO 92/02551 and Babcock, J. S. et al. (1996) Proc. Natl. Acad. Sci. USA 93:7843-7848. In this method, single cells secreting antibodies of interest, e.g., lymphocytes derived from an immunized animal, are identified, and, heavy- and light-chain variable region cDNAs are rescued from the cells by reverse transcriptase-PCR and these variable regions can then be expressed, in the context of appropriate immunoglobulin constant regions (e.g., human constant regions), in mammalian host cells, such as COS or CHO cells. The host cells transfected with the amplified immunoglobulin sequences, derived from in vivo selected lymphocytes, can then undergo further analysis and selection in vitro, for example by panning the transfected cells to isolate cells expressing antibodies to the antigen of interest. The amplified immunoglobulin sequences further can be manipulated in vitro, such as by in vitro affinity maturation methods such as those described in PCT Publication WO 97/29131 and PCT Publication WO 00/56772.

[0124] Monoclonal antibodies are also produced by immunizing a non-human animal comprising some, or all, of the human immunoglobulin locus with an antigen of interest. In an embodiment, the non-human animal is a XENOMOUSE transgenic mouse, an engineered mouse strain that comprises large fragments of the human immunoglobulin loci and is deficient in mouse antibody production. See, e.g., Green et al. Nature Genetics 7:13-21 (1994) and U.S. Pat. Nos. 5,916,771, 5,939,598, 5,985,615, 5,998,209, 6,075,181, 6,091,001, 6,114,598 and 6,130,364. See also WO 91/10741, published Jul. 25, 1991, WO 94/02602, published Feb. 3, 1994, WO 96/34096 and WO 96/33735, both published Oct. 31, 1996, WO 98/16654, published Apr. 23, 1998, WO 98/24893, published Jun. 11, 1998, WO 98/50433, published Nov. 12, 1998, WO 99/45031, published Sep. 10, 1999, WO 99/53049, published Oct. 21, 1999, WO 00 09560, published Feb. 24, 2000 and WO 00/037504, published Jun. 29, 2000. The XENOMOUSE transgenic mouse produces an adult-like human repertoire of fully human antibodies, and generates antigen-specific human monoclonal antibodies. The XENOMOUSE transgenic mouse contains approximately 80% of the human antibody repertoire through introduction of megabase sized, germline configuration YAC fragments of the human heavy chain loci and x light chain loci. See Mendez et al., Nature Genetics 15:146-156 (1997), Green and Jakobovits J. Exp. Med. 188:483-495 (1998), the disclosures of which are hereby incorporated by reference.

[0125] In vitro methods also can be used to make the parent antibodies, wherein an antibody library is screened to identify an antibody having the desired binding specificity. Methods for such screening of recombinant antibody libraries are well known in the art and include methods described in, for example, Ladner et al. U.S. Pat. No. 5,223,409; Kang et al. PCT Publication No. WO 92/18619; Dower et al. PCT Publication No. WO 91/17271; Winter et al. PCT Publication No. WO 92/20791; Markland et al. PCT Publication No. WO 92/15679; Breitling et al. PCT Publication No. WO 93/01288; McCafferty et al. PCT Publication No. WO 92/01047; Garrard et al. PCT Publication No. WO 92/09690; Fuchs et al. (1991) Bio/Technology 9:1370-1372; Hay et al. (1992) Hum Antibod Hybridomas 3:81-85; Huse et al. (1989) Science 246:1275-1281; McCafferty et al., Nature (1990) 348:552-554; Griffiths et al. (1993) EMBO J. 12:725-734; Hawkins et al. (1992) J Mol Biol 226:889-896; Clackson et al. (1991) Nature 352:624-628; Gram et al. (1992) PNAS 89:3576-3580; Garrad et al. (1991) Bio/Technology 9:1373-1377; Hoogenboom et al. (1991) Nuc Acid Res 19:4133-4137; and Barbas et al. (1991) PNAS 88:7978-7982, US patent application publication 20030186374, and PCT Publication No. WO 97/29131, the contents of each of which are incorporated herein by reference.

[0126] Parent antibodies can also be generated using various phage display methods known in the art. In phage display methods, functional antibody domains are displayed on the surface of phage particles which carry the polynucleotide sequences encoding them. In a particular, such phage can be utilized to display antigen-binding domains expressed from a repertoire or combinatorial antibody library (e.g., human or murine). Phage expressing an antigen binding domain that binds the antigen of interest can be selected or identified with antigen, e.g., using labeled antigen or antigen bound or captured to a solid surface or bead. Phage used in these methods are typically filamentous phage including fd and M13 binding domains expressed from phage with Fab, Fv or disulfide stabilized Fv antibody domains recombinantly fused to either the phage gene III or gene VILE protein. Examples of phage display methods that can be used to make the antibodies provided herein include those disclosed in Brinkman et al., J. Immunol. Methods 182:41-50 (1995); Ames et al., J. Immunol. Methods 184:177-186 (1995); Kettleborough et al., Eur. J. Immunol. 24:952-958 (1994); Persic et al., Gene 187 9-18 (1997); Burton et al., Advances in Immunology 57:191-280 (1994); PCT application No. PCT/GB91/01134; PCT publications WO 90/02809; WO 91/10737; WO 92/01047; WO 92/18619; WO 93/11236; WO 95/15982; WO 95/20401; and U.S. Pat. Nos. 5,698,426; 5,223,409; 5,403,484; 5,580,717; 5,427,908; 5,750,753; 5,821,047; 5,571,698; 5,427,908; 5,516,637; 5,780,225; 5,658,727; 5,733,743 and 5,969,108; each of which is incorporated herein by reference in its entirety.

[0127] As described in the herein references, after phage selection, the antibody coding regions from the phage can be isolated and used to generate whole antibodies including human antibodies or any other desired antigen binding fragment, and expressed in any desired host, including mammalian cells, insect cells, plant cells, yeast, and bacteria, e.g., as described in detail below. For example, techniques to recombinantly produce Fab, Fab′ and F(ab′)2 fragments can also be employed using methods known in the art such as those disclosed in PCT publication WO 92/22324; Mullinax et al., BioTechniques 12(6):864-869 (1992); and Sawai et al., AJRI 34:26-34 (1995); and Better et al., Science 240:1041-1043 (1988) (said references incorporated by reference in their entireties). Examples of techniques which can be used to produce single-chain Fvs and antibodies include those described in U.S. Pat. Nos. 4,946,778 and 5,258,498; Huston et al., Methods in Enzymology 203:46-88 (1991); Shu et al., PNAS 90:7995-7999 (1993); and Skerra et al., Science 240:1038-1040 (1988).

[0128] Alternative to screening of recombinant antibody libraries by phage display, other methodologies known in the art for screening large combinatorial libraries can be applied to the identification of parent antibodies. One type of alternative expression system is one in which the recombinant antibody library is expressed as RNA-protein fusions, as described in PCT Publication No. WO 98/31700 by Szostak and Roberts, and in Roberts, R. W. and Szostak, J. W. (1997) Proc. Natl. Acad. Sci. USA 94:12297-12302. In this system, a covalent fusion is created between an mRNA and the peptide or protein that it encodes by in vitro translation of synthetic mRNAs that carry puromycin, a peptidyl acceptor antibiotic, at their 3′ end. Thus, a specific mRNA can be enriched from a complex mixture of mRNAs (e.g., a combinatorial library) based on the properties of the encoded peptide or protein, e.g., antibody, or portion thereof, such as binding of the antibody, or portion thereof, to the dual specificity antigen. Nucleic acid sequences encoding antibodies, or portions thereof, recovered from screening of such libraries can be expressed by recombinant means as described herein (e.g., in mammalian host cells) and, moreover, can be subjected to further affinity maturation by either additional rounds of screening of mRNA-peptide fusions in which mutations have been introduced into the originally selected sequence(s), or by other methods for affinity maturation in vitro of recombinant antibodies, as described herein.

[0129] In another approach the parent antibodies can also be generated using yeast display methods known in the art. In yeast display methods, genetic methods are used to tether antibody domains to the yeast cell wall and display them on the surface of yeast. In particular, such yeast can be utilized to display antigen-binding domains expressed from a repertoire or combinatorial antibody library (e.g., human or murine). Examples of yeast display methods that can be used to make the parent antibodies include those disclosed in Wittrup, et al. U.S. Pat. No. 6,699,658 incorporated herein by reference.

[0130] The antibodies described herein can be further modified to generate CDR grafted and humanized parent antibodies. CDR-grafted parent antibodies comprise heavy and light chain variable region sequences from a human antibody wherein one or more of the CDR regions of V_{H} and/or V_{L} are replaced with CDR sequences of murine antibodies capable of binding antigen of interest. A framework sequence from any human antibody may serve as the template for CDR grafting. However, straight chain replacement onto such a framework often leads to some loss of binding affinity to the antigen. The more homologous a human antibody is to the original murine antibody, the less likely the possibility that combining the murine CDRs with the human framework will introduce distortions in the CDRs that could reduce affinity. Therefore, in an embodiment, the human variable framework that is chosen to replace the murine variable framework apart from the CDRs have at least a 65% sequence identity with the murine antibody variable region framework. In an embodiment, the human and murine variable regions apart from the CDRs have at least 70% sequence identify. In a particular embodiment, that the human and murine variable regions apart from the CDRs have at least 75% sequence identity. In another embodiment, the human and murine variable regions apart from the CDRs have at least 80% sequence identity. Methods for producing such antibodies are known in the art (see EP 239,400; PCT publication WO 91/09967; U.S. Pat. Nos. 5,225,539; 5,530,101; and 5,585,089), veneering or resurfacing (EP 592,106; EP 519,596; Padlan, Molecular Immunology 28(4/5):489-498 (1991); Studnicka et al., Protein Engineering 7(6):805-814 (1994); Roguska et al., PNAS 91:969-973 (1994)), and chain shuffling (U.S. Pat. No. 5,565,352); and anti-idiotypic antibodies.

[0131] Humanized antibodies are antibody molecules from non-human species antibody that binds the desired antigen having one or more complementarity determining regions (CDRs) from the non-human species and framework regions from a human immunoglobulin molecule. Known human Ig sequences are disclosed, e.g., www.ncbi.nlm.nih.gov/entrez-/query.fcgi; www.atcc.org/phage/hdb.html; www.sciquest.com/; www.abcam.com/; www.antibodyresource.com/onlinecomp.html; www.public.iastate.edu/.about.pedro/research_tools.html; www.mgen.uni-heidelberg.de/SD/IT/IT.html; www.whfreeman.com/immunology/CH-05/kuby05.htm; www.library.thinkquest.org/12429/Immune/Antibody.html; www.hhmi.org/grants/lectures/1996/vlab/; www.path.cam.ac.uk/.about.mrc7/m-ikeimages.html; www.antibodyresource.com/; mcb.harvard.edu/BioLinks/Immunology.html.www.immunologylink.com/; pathbox.wustl.edu/.about.hcenter/index.-html; www.biotech.ufl.edu/.about.hcl/; www.pebio.com/pa/340913/340913.html-; www.nal.usda.gov/awic/pubs/antibody/; www.m.ehime-u.acjp/.about.yasuhito-/Elisa.html; www.biodesign.com/table.asp; www.icnet.uk/axp/facs/davies/lin-ks.html; www.biotech.ufl.edu/.about.fccl/protocol.html; www.isac-net.org/sites_geo.html; aximtl.imt.uni-marburg.de/.about.rek/AEP-Start.html; baserv.uci.kun.nlLabout.jraats/linksl.html; www.recab.uni-hd.de/immuno.bme.nwu.edu/; www.mrc-cpe.cam.ac.uk/imt-doc/public/INTRO.html; www.ibt.unam.mx/virN_mice.html; imgt.cnusc.fr:8104/; www.biochem.ucl.ac.uk/.about.martin/abs/index.html; antibody.bath.ac.uk/; abgen.cvm.tamu.edu/lab/wwwabgen.html; www.unizh.chLabout.honegger/AHOsem-inar/Slide01.html; www.cryst.bbk.ac.uk/.about.ubcg07s/; www.nimr.mrc.ac.uk/CC/ccaewg/ccaewg.htm; www.path.cam.ac.uk/.about.mrc7/h-umanisation/TAHHP.html; www.ibt.unam.mx/vir/structure/stat_aim.html; www.biosci.missouri.edu/smithgp/index.html; www.cryst.bioc.cam.ac.uk/.abo-utimolina/Web-pages/Pept/spottech.html; www.jerini.de/fr roducts.htm; www.patents.ibm.com/ibm.html.Kabat et al., Sequences of Proteins of Immunological Interest, U.S. Dept. Health (1983), each entirely incorporated herein by reference. Such imported sequences can be used to reduce immunogenicity or reduce, enhance or modify binding, affinity, on-rate, off-rate, avidity, specificity, half-life, or any other suitable characteristic, as known in the art.

[0132] Framework residues in the human framework regions may be substituted with the corresponding residue from the CDR donor antibody to alter, e.g., improve, antigen binding. These framework substitutions are identified by methods well known in the art, e.g., by modeling of the interactions of the CDR and framework residues to identify framework residues important for antigen binding and sequence comparison to identify unusual framework residues at particular positions. (See, e.g., Queen et al., U.S. Pat. No. 5,585,089; Riechmann et al., Nature 332:323 (1988), which are incorporated herein by reference in their entireties.) Three-dimensional immunoglobulin models are commonly available and are familiar to those skilled in the art. Computer programs are available which illustrate and display probable three-dimensional conformational structures of selected candidate immunoglobulin sequences. Inspection of these displays permits analysis of the likely role of the residues in the functioning of the candidate immunoglobulin sequence, i.e., the analysis of residues that influence the ability of the candidate immunoglobulin to bind its antigen. In this way, FR residues can be selected and combined from the consensus and import sequences so that the desired antibody characteristic, such as increased affinity for the target antigen(s), is achieved. In general, the CDR residues are directly and most substantially involved in influencing antigen binding. Antibodies can be humanized using a variety of techniques known in the art, such as but not limited to those described in Jones et al., Nature 321:522 (1986); Verhoeyen et al., Science 239:1534 (1988)), Sims et al., J. Immunol. 151: 2296 (1993); Chothia and Lesk, J. Mol. Biol. 196:901 (1987), Carter et al., Proc. Natl. Acad. Sci. U.S.A. 89:4285 (1992); Presta et al., J. Immunol. 151:2623 (1993), Padlan, Molecular Immunology 28(4/5):489-498 (1991); Studnicka et al., Protein Engineering 7(6):805-814 (1994); Roguska. et al., PNAS 91:969-973 (1994); PCT publication WO 91/09967, PCT/: US98/16280, US96/18978, US91/09630, US91/05939, US94/01234, GB89/01334, GB91/01134, GB92/01755; WO90/14443, WO90/14424, WO90/14430, EP 229246, EP 592,106; EP 519,596, EP 239,400, U.S. Pat. Nos. 5,565,332, 5,723,323, 5,976,862, 5,824,514, 5,817,483, 5,814,476, 5,763,192, 5,723,323, 5,766886, 5,714,352, 6,204,023, 6,180,370, 5,693,762, 5,530,101, 5,585,089, 5,225,539; 4,816,567, each entirely incorporated herein by reference, included references cited therein.

### B. Criteria for Selecting Parent Monoclonal Antibodies

[0133] An embodiment is provided comprising selecting parent antibodies with at least one or more properties desired in the DVD-Ig molecule. In an embodiment, the desired property is one or more antibody parameters. In another embodiment, the antibody parameters are antigen specificity, affinity to antigen, potency, biological function, epitope recognition, stability, solubility, production efficiency, immunogenicity, pharmacokinetics, bioavailability, tissue cross reactivity, or orthologous antigen binding.

### B1. Affinity to Antigen

[0134] The desired affinity of a therapeutic mAb may depend upon the nature of the antigen, and the desired therapeutic end-point. In an embodiment, monoclonal antibodies have higher affinities (Kd=0.01-0.50 μM) when blocking a cytokine-cytokine receptor interaction as such interaction are usually high affinity interactions (e.g., <pM-<nM ranges). In such instances, the mAb affinity for its target should be equal to or better than the affinity of the cytokine (ligand) for its receptor. On the other hand, mAb with lesser affinity (>nM range) could be therapeutically effective e.g., in clearing circulating potentially pathogenic proteins e.g., monoclonal antibodies that bind to, sequester, and clear circulating species of A-β amyloid. In other instances, reducing the affinity of an existing high affinity mAb by site-directed mutagenesis or using a mAb with lower affinity for its target could be used to avoid potential side-effects e.g., a high affinity mAb may sequester/neutralize all of its intended target, thereby completely depleting/eliminating the function(s) of the targeted protein. In this scenario, a low affinity mAb may sequester/neutralize a fraction of the target that may be responsible for the disease symptoms (the pathological or over-produced levels), thus allowing a fraction of the target to continue to perform its normal physiological function(s). Therefore, it may be possible to reduce the Kd to adjust dose and/or reduce side-effects. The affinity of the parental mAb might play a role in appropriately targeting cell surface molecules to achieve desired therapeutic out-come. For example, if a target is expressed on cancer cells with high density and on normal cells with low density, a lower affinity mAb will bind a greater number of targets on tumor cells than normal cells, resulting in tumor cell elimination via ADCC or CDC, and therefore might have therapeutically desirable effects. Thus selecting a mAb with desired affinity may be relevant for both soluble and surface targets.

[0135] Signaling through a receptor upon interaction with its ligand may depend upon the affinity of the receptor-ligand interaction. Similarly, it is conceivable that the affinity of a mAb for a surface receptor could determine the nature of intracellular signaling and whether the mAb may deliver an agonist or an antagonist signal. The affinity-based nature of mAb-mediated signaling may have an impact of its side-effect profile. Therefore, the desired affinity and desired functions of therapeutic monoclonal antibodies need to be determined carefully by in vitro and in vivo experimentation.

[0136] The desired Kd of a binding protein (e.g., an antibody) may be determined experimentally depending on the desired therapeutic outcome. In an embodiment parent antibodies with affinity (Kd) for a particular antigen equal to, or better than, the desired affinity of the DVD-Ig for the same antigen are selected. The antigen binding affinity and kinetics are assessed by Biacore or another similar technique. In one embodiment, each parent antibody has a dissociation constant (Kd) to its antigen of: at most about 10⁻⁷M; at most about 10⁻⁸M; at most about 10⁻⁹M; at most about 10⁻¹⁰M; at most about 10⁻¹¹M; at most about 10⁻¹²M; or at most 10⁻¹³M. First parent antibody from which VD1 is obtained and second parent antibody from which VD2 is obtained may have similar or different affinity (K_{D}) for the respective antigen. Each parent antibody has an on rate constant (Kon) to the antigen of: at least about 10²M⁻¹s⁻¹; at least about 10³M⁻¹s⁻¹; at least about 10⁴M⁻¹s⁻¹; at least about 10⁵M⁻¹s⁻¹; or at least about 10⁶M⁻¹s⁻¹, as measured by surface plasmon resonance. The first parent antibody from which VD1 is obtained and the second parent antibody from which VD2 is obtained may have similar or different on rate constant (Kon) for the respective antigen. In one embodiment, each parent antibody has an off rate constant (Koff) to the antigen of: at most about 10⁻³s⁻¹; at most about 10⁻⁴s⁻¹; at most about 10⁻⁵s⁻¹; or at most about 10⁻⁶s⁻¹, as measured by surface plasmon resonance. The first parent antibody from which VD1 is obtained and the second parent antibody from which VD2 is obtained may have similar or different off rate constants (Koff) for the respective antigen.

### B2. Potency

[0137] The desired affinity/potency of parental monoclonal antibodies will depend on the desired therapeutic outcome. For example, for receptor-ligand (R-L) interactions the affinity (kd) is equal to or better than the R-L kd (pM range). For simple clearance of a pathologic circulating protein, the kd could be in low nM range e.g., clearance of various species of circulating A-13 peptide. In addition, the kd will also depend on whether the target expresses multiple copies of the same epitope e.g a mAb targeting conformational epitope in Aβ oligomers.

[0138] Where VD1 and VD2 bind the same antigen, but distinct epitopes, the DVD-Ig will contain 4 binding sites for the same antigen, thus increasing avidity and thereby the apparent kd of the DVD-Ig. In an embodiment, parent antibodies with equal or lower kd than that desired in the DVD-Ig are chosen. The affinity considerations of a parental mAb may also depend upon whether the DVD-Ig contains four or more identical antigen binding sites (i.e; a DVD-Ig from a single mAb). In this case, the apparent kd would be greater than the mAb due to avidity. Such DVD-Igs can be employed for cross-linking surface receptor, increase neutralization potency, enhance clearance of pathological proteins etc.

[0139] In an embodiment parent antibodies with neutralization potency for specific antigen equal to or better than the desired neutralization potential of the DVD-Ig for the same antigen are selected. The neutralization potency can be assessed by a target-dependent bioassay where cells of appropriate type produce a measurable signal (i.e. proliferation or cytokine production) in response to target stimulation, and target neutralization by the mAb can reduce the signal in a dose-dependent manner.

### B3. Biological Functions

[0140] Monoclonal antibodies can perform potentially several functions. Some of these functions are listed in Table 1. These functions can be assessed by both in vitro assays (e.g., cell-based and biochemical assays) and in vivo animal models.

TABLE 1
Some Potential Applications For Therapeutic Antibodies

| Target (Class) | Mechanism of Action (target) |
|---|---|
| Soluble | Neutralization of activity (e.g., a cytokine) |
| (cytokines, other) | Enhance clearance (e.g., Aβ oligomers) |
| | Increase half-life (e.g., GLP 1) |
| Cell Surface | Agonist (e.g., GLP1 R; EPO R; etc.) |
| (Receptors, other) | Antagonist (e.g., integrins; etc.) |
| | Cytotoxic (CD 20; etc.) |
| Protein deposits | Enhance clearance/degradation (e.g., Aβ plaques, |
| | amyloid deposits) |

[0141] MAbs with distinct functions described in the examples herein in Table 1 can be selected to achieve desired therapeutic outcomes. Two or more selected parent monoclonal antibodies can then be used in DVD-Ig format to achieve two distinct functions in a single DVD-Ig molecule. For example, a DVD-Ig can be generated by selecting a parent mAb that neutralizes function of a specific cytokine, and selecting a parent mAb that enhances clearance of a pathological protein. Similarly, we can select two parent monoclonal antibodies that recognize two different cell surface receptors, one mAb with an agonist function on one receptor and the other mAb with an antagonist function on a different receptor. These two selected monoclonal antibodies each with a distinct function can be used to construct a single DVD-Ig molecule that will possess the two distinct functions (agonist and antagonist) of the selected monoclonal antibodies in a single molecule. Similarly, two antagonistic monoclonal antibodies to cell surface receptors each blocking binding of respective receptor ligands (e.g., EGF and IGF) can be used in a DVD-Ig format. Conversely, an antagonistic anti-receptor mAb (e.g., anti-EGFR) and a neutralizing anti-soluble mediator (e.g., anti-IGF1/2) mAb can be selected to make a DVD-Ig.

### B4. Epitope Recognition

[0142] Different regions of proteins may perform different functions. For example specific regions of a cytokine interact with the cytokine receptor to bring about receptor activation whereas other regions of the protein may be required for stabilizing the cytokine. In this instance one may select a mAb that binds specifically to the receptor interacting region(s) on the cytokine and thereby block cytokine-receptor interaction. In some cases, for example certain chemokine receptors that bind multiple ligands, a mAb that binds to the epitope (region on chemokine receptor) that interacts with only one ligand can be selected. In other instances, monoclonal antibodies can bind to epitopes on a target that are not directly responsible for physiological functions of the protein, but binding of a mAb to these regions could either interfere with physiological functions (steric hindrance) or alter the conformation of the protein such that the protein cannot function (mAb to receptors with multiple ligand which alter the receptor conformation such that none of the ligand can bind). Anti-cytokine monoclonal antibodies that do not block binding of the cytokine to its receptor, but block signal transduction have also been identified (e.g., 125-2H, an anti-IL-18 mAb).

[0143] Examples of epitopes and mAb functions include, but are not limited to, blocking Receptor-Ligand (R-L) interaction (neutralizing mAb that binds R-interacting site); steric hindrance resulting in diminished or no R-binding. An Ab can bind the target at a site other than a receptor binding site, but still interferes with receptor binding and functions of the target by inducing conformational change and eliminate function (e.g., Xolair), binding to R but block signaling (125-2H).

[0144] In an embodiment, the parental mAb needs to target the appropriate epitope for maximum efficacy. Such epitope should be conserved in the DVD-Ig. The binding epitope of a mAb can be determined by several approaches, including co-crystallography, limited proteolysis of mAb-antigen complex plus mass spectrometric peptide mapping (Legros V. et al 2000 Protein Sci. 9:1002-10), phage displayed peptide libraries (O'Connor K H et al 2005 J Immunol Methods. 299:21-35), as well as mutagenesis (Wu C. et al. 2003 J Immunol 170:5571-7).

### B5. Physicochemical and Pharmaceutical Properties

[0145] Therapeutic treatment with antibodies often requires administration of high doses, often several mg/kg (due to a low potency on a mass basis as a consequence of a typically large molecular weight). In order to accommodate patient compliance and to adequately address chronic disease therapies and outpatient treatment, subcutaneous (s.c.) or intramuscular (i.m.) administration of therapeutic mAbs is desirable. For example, the maximum desirable volume for s.c. administration is ˜1.0 mL, and therefore, concentrations of >100 mg/mL are desirable to limit the number of injections per dose. In an embodiment, the therapeutic antibody is administered in one dose. The development of such formulations is constrained, however, by protein-protein interactions (e.g., aggregation, which potentially increases immunogenicity risks) and by limitations during processing and delivery (e.g., viscosity). Consequently, the large quantities required for clinical efficacy and the associated development constraints limit full exploitation of the potential of antibody formulation and s.c. administration in high-dose regimens. It is apparent that the physicochemical and pharmaceutical properties of a protein molecule and the protein solution are of utmost importance, e.g., stability, solubility and viscosity features.

### B5.1. Stability

[0146] A “stable” antibody formulation is one in which the antibody therein essentially retains its physical stability and/or chemical stability and/or biological activity upon storage. Stability can be measured at a selected temperature for a selected time period. In an embodiment, the antibody in the formulation is stable at room temperature (about 30° C.) or at 40° C. for at least 1 month and/or stable at about 2-8° C. for at least 1 year for at least 2 years. Furthermore, in an embodiment, the formulation is stable following freezing (to, e.g., −70° C.) and thawing of the formulation, hereinafter referred to as a “freeze/thaw cycle.” In another example, a “stable” formulation may be one wherein less than about 10% and less than about 5% of the protein is present as an aggregate in the formulation.

[0147] A DVD-Ig stable in vitro at various temperatures for an extended time period is desirable. One can achieve this by rapid screening of parental mAbs stable in vitro at elevated temperature, e.g., at 40° C. for 2-4 weeks, and then assess stability. During storage at 2-8° C., the protein reveals stability for at least 12 months, e.g., at least 24 months. Stability (% of monomeric, intact molecule) can be assessed using various techniques such as cation exchange chromatography, size exclusion chromatography, SDS-PAGE, as well as bioactivity testing. For a more comprehensive list of analytical techniques that may be employed to analyze covalent and conformational modifications see Jones, A. J. S. (1993) Analytical methods for the assessment of protein formulations and delivery systems. In: Cleland, J. L.; Langer, R., editors. Formulation and delivery of peptides and proteins, 1^{st} edition, Washington, ACS, pg. 22-45; and Pearlman, R.; Nguyen, T. H. (1990) Analysis of protein drugs. In: Lee, V. H., editor. Peptide and protein drug delivery, 1st edition, New York, Marcel Dekker, Inc., pg. 247-301.

[0148] Heterogeneity and aggregate formation: stability of the antibody may be such that the formulation may reveal less than about 10%, and, in an embodiment, less than about 5%, in another embodiment, less than about 2%, or, in an embodiment, within the range of 0.5% to 1.5% or less in the GMP antibody material that is present as aggregate. Size exclusion chromatography is a method that is sensitive, reproducible, and very robust in the detection of protein aggregates.

[0149] In addition to low aggregate levels, the antibody must, in an embodiment, be chemically stable. Chemical stability may be determined by ion exchange chromatography (e.g., cation or anion exchange chromatography), hydrophobic interaction chromatography, or other methods such as isoelectric focusing or capillary electrophoresis. For instance, chemical stability of the antibody may be such that after storage of at least 12 months at 2-8° C. the peak representing unmodified antibody in a cation exchange chromatography may increase not more than 20%, in an embodiment, not more than 10%, or, in another embodiment, not more than 5% as compared to the antibody solution prior to storage testing.

[0150] In an embodiment, the parent antibodies display structural integrity; correct disulfide bond formation, and correct folding: Chemical instability due to changes in secondary or tertiary structure of an antibody may impact antibody activity. For instance, stability as indicated by activity of the antibody may be such that after storage of at least 12 months at 2-8° C. the activity of the antibody may decrease not more than 50%, in an embodiment not more than 30%, or even not more than 10%, or in an embodiment not more than 5% or 1% as compared to the antibody solution prior to storage testing. Suitable antigen-binding assays can be employed to determine antibody activity.

### B5.2. Solubility

[0151] The “solubility” of a mAb correlates with the production of correctly folded, monomeric IgG. The solubility of the IgG may therefore be assessed by HPLC. For example, soluble (monomeric) IgG will give rise to a single peak on the HPLC chromatograph, whereas insoluble (e.g., multimeric and aggregated) will give rise to a plurality of peaks. A person skilled in the art will therefore be able to detect an increase or decrease in solubility of an IgG using routine HPLC techniques. For a more comprehensive list of analytical techniques that may be employed to analyze solubility (see Jones, A. G. Dep. Chem. Biochem. Eng., Univ. Coll. London, London, UK. Editor(s): Shamlou, P. Ayazi. Process. Solid-Liq. Suspensions (1993), 93-117. Publisher: Butterworth-Heinemann, Oxford, UK and Pearlman, Rodney; Nguyen, Tue H, Advances in Parenteral Sciences (1990), 4 (Pept. Protein Drug Delivery), 247-301). Solubility of a therapeutic mAb is critical for formulating to high concentration often required for adequate dosing. As outlined herein, solubilities of >100 mg/mL may be required to accommodate efficient antibody dosing. For instance, antibody solubility may be not less than about 5 mg/mL in early research phase, in an embodiment not less than about 25 mg/mL in advanced process science stages, or in an embodiment not less than about 100 mg/mL, or in an embodiment not less than about 150 mg/mL. It is obvious to a person skilled in the art that the intrinsic properties of a protein molecule are important the physico-chemical properties of the protein solution, e.g., stability, solubility, viscosity. However, a person skilled in the art will appreciate that a broad variety of excipients exist that may be used as additives to beneficially impact the characteristics of the final protein formulation. These excipients may include: (i) liquid solvents, cosolvents (e.g., alcohols such as ethanol); (ii) buffering agents (e.g., phosphate, acetate, citrate, amino acid buffers); (iii) sugars or sugar alcohols (e.g., sucrose, trehalose, fructose, raffinose, mannitol, sorbitol, dextrans); (iv) surfactants (e.g., polysorbate 20, 40, 60, 80, poloxamers); (v) isotonicity modifiers (e.g., salts such as NaCl, sugars, sugar alcohols); and (vi) others (e.g., preservatives, chelating agents, antioxidants, chelating substances (e.g., EDTA), biodegradable polymers, carrier molecules (e.g., HSA, PEGs)

[0152] Viscosity is a parameter of high importance with regard to antibody manufacture and antibody processing (e.g., diafiltration/ultrafiltration), fill-finish processes (pumping aspects, filtration aspects) and delivery aspects (syringeability, sophisticated device delivery). Low viscosities enable the liquid solution of the antibody having a higher concentration. This enables the same dose may be administered in smaller volumes. Small injection volumes inhere the advantage of lower pain on injection sensations, and the solutions not necessarily have to be isotonic to reduce pain on injection in the patient. The viscosity of the antibody solution may be such that at shear rates of 100 (1/s) antibody solution viscosity is below 200 mPa s, in an embodiment below 125 mPa s, in another embodiment below 70 mPa s, and in yet another embodiment below 25 mPa s or even below 10 mPa s.

### B 5.3. Production Efficiency

[0153] The generation of a DVD-Ig that is efficiently expressed in mammalian cells, such as Chinese hamster ovary cells (CHO), will in an embodiment require two parental monoclonal antibodies which are themselves expressed efficiently in mammalian cells. The production yield from a stable mammalian line (i.e., CHO) should be above about 0.5 g/L, in an embodiment above about 1 g/L, and in another embodiment in the range of about 2-5 g/L or more (Kipriyanov S M, Little M. 1999 Mol. Biotechnol. 12:173-201; Carroll S, Al-Rubeai M. 2004 Expert Opin Biol Then 4:1821-9).

[0154] Production of antibodies and Ig fusion proteins in mammalian cells is influenced by several factors. Engineering of the expression vector via incorporation of strong promoters, enhancers and selection markers can maximize transcription of the gene of interest from an integrated vector copy. The identification of vector integration sites that are permissive for high levels of gene transcription can augment protein expression from a vector (Wurm et al, 2004, Nature Biotechnology, 2004, Vol/Iss/Pg. 22/11 (1393-1398)). Furthermore, levels of production are affected by the ratio of antibody heavy and light chains and various steps in the process of protein assembly and secretion (Jiang et al. 2006, Biotechnology Progress, January-February 2006, vol. 22, no. 1, p. 313-8).

### B 6. Immunogenicity

[0155] Administration of a therapeutic mAb may results in certain incidence of an immune response (ie, the formation of endogenous antibodies directed against the therapeutic mAb). Potential elements that might induce immunogenicity should be analyzed during selection of the parental monoclonal antibodies, and steps to reduce such risk can be taken to optimize the parental monoclonal antibodies prior to DVD-Ig construction. Mouse-derived antibodies have been found to be highly immunogenic in patients. The generation of chimeric antibodies comprised of mouse variable and human constant regions presents a logical next step to reduce the immunogenicity of therapeutic antibodies (Morrison and Schlom, 1990). Alternatively, immunogenicity can be reduced by transferring murine CDR sequences into a human antibody framework (reshaping/CDR grafting/humanization), as described for a therapeutic antibody by Riechmann et al., 1988. Another method is referred to as “resurfacing” or “veneering”, starting with the rodent variable light and heavy domains, only surface-accessible framework amino acids are altered to human ones, while the CDR and buried amino acids remain from the parental rodent antibody (Roguska et al., 1996). In another type of humanization, instead of grafting the entire CDRs, one technique grafts only the “specificity-determining regions” (SDRs), defined as the subset of CDR residues that are involved in binding of the antibody to its target (Kashmiri et al., 2005). This necessitates identification of the SDRs either through analysis of available three-dimensional structures of antibody-target complexes or mutational analysis of the antibody CDR residues to determine which interact with the target. Alternatively, fully human antibodies may have reduced immunogenicity compared to murine, chimeric or humanized antibodies.

[0156] Another approach to reduce the immunogenicity of therapeutic antibodies is the elimination of certain specific sequences that are predicted to be immunogenic. In one approach, after a first generation biologic has been tested in humans and found to be unacceptably immunogenic, the B-cell epitopes can be mapped and then altered to avoid immune detection. Another approach uses methods to predict and remove potential T-cell epitopes. Computational methods have been developed to scan and to identify the peptide sequences of biologic therapeutics with the potential to bind to MHC proteins (Desmet et al., 2005). Alternatively a human dendritic cell-based method can be used to identify CD4⁺ T-cell epitopes in potential protein allergens (Stickler et al., 2005; S. L. Morrison and J. Schlom, Important Adv. Oncol. (1990), pp. 3-18; Riechmann, L., Clark, M., Waldmann, H. and Winter, G. “Reshaping human antibodies for therapy.” Nature (1988) 332: 323-327; Roguska-M-A, Pedersen-J-T, Henry-A-H, Searle-S-M, Roja-C-M, Avery-B, Hoffee-M, Cook-S, Lambert-J-M, Blattler-W-A, Rees-A-R, Guild-B-C. A comparison of two murine mAbs humanized by CDR-grafting and variable domain resurfacing. Protein engineering, {Protein-Eng}, 1996, vol. 9, p. 895-904; Kashmiri-Syed-V-S, De-Pascalis-Roberto, Gonzales-Noreen-R, Schlom-Jeffrey. SDR grafting—a new approach to antibody humanization. Methods (San Diego Calif.), {Methods}, May 2005, vol. 36, no. 1, p. 25-34; Desmet-Johan, Meersseman-Geert, Boutonnet-Nathalie, Pletinckx-Jurgen, De-Clercq-Krista, Debulpaep-Maja, Braeckman-Tessa, Lasters-Ignace. Anchor profiles of HLA-specific peptides: analysis by a novel affinity scoring method and experimental validation. Proteins, 2005, vol. 58, p. 53-69; Stickler-M-M, Estell-D-A, Harding-F-A. CD4+T-cell epitope determination using unexposed human donor peripheral blood mononuclear cells. Journal of immunotherapy 2000, vol. 23, p. 654-60.)

### B 7. In Vivo Efficacy

[0157] To generate a DVD-Ig molecule with desired in vivo efficacy, it is important to generate and select mAbs with similarly desired in vivo efficacy when given in combination. However, in some instances the DVD-Ig may exhibit in vivo efficacy that cannot be achieved with the combination of two separate mAbs. For instance, a DVD-Ig may bring two targets in close proximity leading to an activity that cannot be achieved with the combination of two separate mAbs. Additional desirable biological functions are described herein in section B 3. Parent antibodies with characteristics desirable in the DVD-Ig molecule may be selected based on factors such as pharmacokinetic t ½; tissue distribution; soluble versus cell surface targets; and target concentration-soluble/density-surface.

### B 8. In Vivo Tissue Distribution

[0158] To generate a DVD-Ig molecule with desired in vivo tissue distribution, in an embodiment parent mAbs with similar desired in vivo tissue distribution profile must be selected. Alternatively, based on the mechanism of the dual-specific targeting strategy, it may at other times not be required to select parent mAbs with the similarly desired in vivo tissue distribution when given in combination. For instance, in the case of a DVD-Ig in which one binding component targets the DVD-Ig to a specific site thereby bringing the second binding component to the same target site. For example, one binding specificity of a DVD-Ig could target pancreas (islet cells) and the other specificity could bring GLP1 to the pancreas to induce insulin.

### B 9. Isotype

[0159] To generate a DVD-Ig molecule with desired properties including, but not limited to, Isotype, Effector functions and the circulating half-life, in an embodiment parent mAbs with appropriate Fc-effector functions depending on the therapeutic utility and the desired therapeutic end-point are selected. There are five main heavy-chain classes or isotypes some of which have several sub-types and these determine the effector functions of an antibody molecule. These effector functions reside in the hinge region, CH2 and CH3 domains of the antibody molecule. However, residues in other parts of an antibody molecule may have effects on effector functions as well. The hinge region Fc-effector functions include: (i) antibody-dependent cellular cytotoxicity, (ii) complement (C1q) binding, activation and complement-dependent cytotoxicity (CDC), (iii) phagocytosis/clearance of antigen-antibody complexes, and (iv) cytokine release in some instances. These Fc-effector functions of an antibody molecule are mediated through the interaction of the Fc-region with a set of class-specific cell surface receptors. Antibodies of the IgG1 isotype are most active while IgG2 and IgG4 having minimal or no effector functions. The effector functions of the IgG antibodies are mediated through interactions with three structurally homologous cellular Fc receptor types (and sub-types) (FcgR1, FcgRII and FcgRIII). These effector functions of an IgG1 can be eliminated by mutating specific amino acid residues in the lower hinge region (e.g., L234A, L235A) that are required for FcgR and C1q binding. Amino acid residues in the Fc region, in particular the CH2—CH3 domains, also determine the circulating half-life of the antibody molecule. This Fc function is mediated through the binding of the Fc-region to the neonatal Fc receptor (FcRn) which is responsible for recycling of antibody molecules from the acidic lysosomes back to the general circulation.

[0160] Whether a mAb should have an active or an inactive isotype will depend on the desired therapeutic end-point for an antibody. Some examples of usage of isotypes and desired therapeutic outcome are listed below:
[0161] a) If the desired end-point is functional neutralization of a soluble cytokine then an inactive isotype may be used;
[0162] b) If the desired out-come is clearance of a pathological protein an active isotype may be used;
[0163] c) If the desired out-come is clearance of protein aggregates an active isotype may be used;
[0164] d) If the desired outcome is to antagonize a surface receptor an inactive isotype is used (Tysabri, IgG4; OKT3, mutated IgG1);
[0165] e) If the desired outcome is to eliminate target cells an active isotype is used (Herceptin, IgG1 (and with enhanced effector functions); and
[0166] f) If the desired outcome is to clear proteins from circulation without entering the CNS an IgM isotype may be used (e.g., clearing circulating Ab peptide species).
   The Fc effector functions of a parental mAb can be determined by various in vitro methods well known in the art.

[0167] As discussed, the selection of isotype, and thereby the effector functions will depend upon the desired therapeutic end-point. In cases where simple neutralization of a circulating target is desired, for example blocking receptor-ligand interactions, the effector functions may not be required. In such instances isotypes or mutations in the Fc-region of an antibody that eliminate effector functions are desirable. In other instances where elimination of target cells is the therapeutic end-point, for example elimination of tumor cells, isotypes or mutations or de-fucosylation in the Fc-region that enhance effector functions are desirable (Presta G L, Adv. Drug Delivery Rev. 58:640-656, 2006; Satoh M., Iida S., Shitara K. Expert Opinion Biol. Ther. 6:1161-1173, 2006). Similarly, depending up on the therapeutic utility, the circulating half-life of an antibody molecule can be reduced/prolonged by modulating antibody-FcRn interactions by introducing specific mutations in the Fc region (Dall'Acqua W F, Kiener P A, Wu H. J. Biol. Chem. 281:23514-23524, 2006; Petkova S B., Akilesh S., Sproule T J. et al. Internat. Immunol 18:1759-1769, 2006; Vaccaro C., Bawdon R., Wanjie S et al. PNAS 103:18709-18714, 2007).

[0168] The published information on the various residues that influence the different effector functions of a normal therapeutic mAb may need to be confirmed for DVD-Ig. It may be possible that in a DVD-Ig format additional (different) Fc-region residues, other than those identified for the modulation of monoclonal antibody effector functions, may be important.

[0169] Overall, the decision as to which Fc-effector functions (isotype) will be critical in the final DVD-Ig format will depend up on the disease indication, therapeutic target, desired therapeutic end-point and safety considerations. Listed below are exemplary appropriate heavy chain and light chain constant regions including, but not limited to:
[0170] IgG1—allotype: G1mz
[0171] IgG1 mutant—A234, A235
[0172] IgG2—allotype: G2m(n−)
[0173] Kappa—Km3
[0174] Lambda

[0175] Fc Receptor and C1q Studies: The possibility of unwanted antibody-dependent cell-mediated cytotoxicity (ADCC) and complement-dependent cytotoxicity (CDC) by antibody complexing to any overexpressed target on cell membranes can be abrogated by the (for example, L234A, L235A) hinge-region mutations. These substituted amino acids, present in the IgG1 hinge region of mAb, are expected to result in diminished binding of mAb to human Fc receptors (but not FcRn), as FcgR binding is thought to occur within overlapping sites on the IgG1 hinge region. This feature of mAb may lead to an improved safety profile over antibodies containing a wild-type IgG. Binding of mAb to human Fc receptors can be determined by flow cytometry experiments using cell lines (e.g., THP-1, K562) and an engineered CHO cell line that expresses FcgRIIb (or other FcgRs). Compared to IgG1 control monoclonal antibodies, mAb show reduced binding to FcgRI and FcgRIIa whereas binding to FcgRIIb is unaffected. The binding and activation of C1q by antigen/IgG immune complexes triggers the classical complement cascade with consequent inflammatory and/or immunoregulatory responses. The C1q binding site on IgGs has been localized to residues within the IgG hinge region. C1q binding to increasing concentrations of mAb was assessed by C1q ELISA. The results demonstrate that mAb is unable to bind to C1q, as expected when compared to the binding of a wildtype control IgG1. Overall, the L234A, L235A hinge region mutation abolishes binding of mAb to FcgRI, FcgRIIa and C1q but does not impact the interaction of mAb with FcgRIIb. This data suggests that in vivo, mAb with mutant Fc will interact normally with the inhibitory FcgRIIb but will likely fail to interact with the activating FcgRI and FcgRIIa receptors or C1q.

[0176] Human FcRn binding: The neonatal receptor (FcRn) is responsible for transport of IgG across the placenta and to control the catabolic half-life of the IgG molecules. It might be desirable to increase the terminal half-life of an antibody to improve efficacy, to reduce the dose or frequency of administration, or to improve localization to the target. Alternatively, it might be advantageous to do the converse that is, to decrease the terminal half-life of an antibody to reduce whole body exposure or to improve the target-to-non-target binding ratios. Tailoring the interaction between IgG and its salvage receptor, FcRn, offers a way to increase or decrease the terminal half-life of IgG. Proteins in the circulation, including IgG, are taken up in the fluid phase through micropinocytosis by certain cells, such as those of the vascular endothelia. IgG can bind FcRn in endosomes under slightly acidic conditions (pH 6.0-6.5) and can recycle to the cell surface, where it is released under almost neutral conditions (pH 7.0-7.4). Mapping of the Fc-region-binding site on FcRn80, 16, 17 showed that two histidine residues that are conserved across species, His310 and His435, are responsible for the pH dependence of this interaction. Using phage-display technology, a mouse Fc-region mutation that increases binding to FcRn and extends the half-life of mouse IgG was identified (see Victor, G. et al.; Nature Biotechnology (1997), 15(7), 637-640). Fc-region mutations that increase the binding affinity of human IgG for FcRn at pH 6.0, but not at pH 7.4, have also been identified (see Dall'Acqua William F, et al., Journal of Immunology (2002), 169(9), 5171-80). Moreover, in one case, a similar pH-dependent increase in binding (up to 27-fold) was also observed for rhesus FcRn, and this resulted in a twofold increase in serum half-life in rhesus monkeys compared with the parent IgG (see Hinton, Paul R. et al., Journal of Biological Chemistry (2004), 279(8), 6213-6216). These findings indicate that it is feasible to extend the plasma half-life of antibody therapeutics by tailoring the interaction of the Fc region with FcRn. Conversely, Fc-region mutations that attenuate interaction with FcRn can reduce antibody half-life.

### B.10 Pharmacokinetics (PK)

[0177] To generate a DVD-Ig molecule with desired pharmacokinetic profile, in an embodiment parent mAbs with the similarly desired pharmacokinetic profile are selected. One consideration is that immunogenic response to monoclonal antibodies (ie, HAHA, human anti-human antibody response; HACA, human anti-chimeric antibody response) further complicates the pharmacokinetics of these therapeutic agents. In an embodiment, monoclonal antibodies with minimal or no immunogenicity are used for constructing DVD-Ig molecules such that the resulting DVD-Igs will also have minimal or no immunogenicity. Some of the factors that determine the PK of a mAb include, but are not limited to, Intrinsic properties of the mAb amino acid sequence); immunogenicity; FcRn binding and Fc functions.

[0178] The PK profile of selected parental monoclonal antibodies can be easily determined in rodents as the PK profile in rodents correlates well with (or closely predicts) the PK profile of monoclonal antibodies in cynomolgus monkey and humans. The PK profile is determined as described in Example section 1.2.2.3.A.

[0179] After the parental monoclonal antibodies with desired PK characteristics (and other desired functional properties as discussed herein) are selected, the DVD-Ig is constructed. As the DVD-Ig molecules contain two antigen-binding domains from two parental monoclonal antibodies, the PK properties of the DVD-Ig are assessed as well. Therefore, while determining the PK properties of the DVD-Ig, PK assays may be employed that determine the PK profile based on functionality of both antigen-binding domains derived from the 2 parent monoclonal antibodies. The PK profile of a DVD-Ig can be determined as described in Example 1.2.2.3.A. Additional factors that may impact the PK profile of DVD-Ig include the antigen-binding domain (CDR) orientation; Linker size; and Fc/FcRn interactions. PK characteristics of parent antibodies can be evaluated by assessing the following parameters: absorption, distribution, metabolism and excretion.

[0180] Absorption: To date, administration of therapeutic monoclonal antibodies is via parenteral routes (e.g., intravenous [IV], subcutaneous [SC], or intramuscular [IM]). Absorption of a mAb into the systemic circulation following either SC or IM administration from the interstitial space is primarily through the lymphatic pathway. Saturable, presystemic, proteolytic degradation may result in variable absolute bioavailability following extravascular administration. Usually, increases in absolute bioavailability with increasing doses of monoclonal antibodies may be observed due to saturated proteolytic capacity at higher doses. The absorption process for a mAb is usually quite slow as the lymph fluid drains slowly into the vascular system, and the duration of absorption may occur over hours to several days. The absolute bioavailability of monoclonal antibodies following SC administration generally ranges from 50% to 100%. In the case of a transport-mediating structure at the blood-brain barrier targeted by the DVD-Ig construct, circulation times in plasma may be reduced due to enhanced trans-cellular transport at the blood brain barrier (BBB) into the CNS compartment, where the DVD-Ig is liberated to enable interaction via its second antigen recognition site.

[0181] Distribution: Following IV administration, monoclonal antibodies usually follow a biphasic serum (or plasma) concentration-time profile, beginning with a rapid distribution phase, followed by a slow elimination phase. In general, a biexponential pharmacokinetic model best describes this kind of pharmacokinetic profile. The volume of distribution in the central compartment (Vc) for a mAb is usually equal to or slightly larger than the plasma volume (2-3 liters). A distinct biphasic pattern in serum (plasma) concentration versus time profile may not be apparent with other parenteral routes of administration, such as 1M or SC, because the distribution phase of the serum (plasma) concentration-time curve is masked by the long absorption portion. Many factors, including physicochemical properties, site-specific and target-oriented receptor mediated uptake, binding capacity of tissue, and mAb dose can influence biodistribution of a mAb. Some of these factors can contribute to nonlinearity in biodistribution for a mAb.

[0182] Metabolism and Excretion: Due to the molecular size, intact monoclonal antibodies are not excreted into the urine via kidney. They are primarily inactivated by metabolism (e.g., catabolism). For IgG-based therapeutic monoclonal antibodies, half-lives typically ranges from hours or 1-2 days to over 20 days. The elimination of a mAb can be affected by many factors, including, but not limited to, affinity for the FcRn receptor, immunogenicity of the mAb, the degree of glycosylation of the mAb, the susceptibility for the mAb to proteolysis, and receptor-mediated elimination.

### B.11 Tissue Cross-Reactivity Pattern on Human and Tox Species

[0183] Identical staining pattern suggests that potential human toxicity can be evaluated in tox species. Tox species are those animal in which unrelated toxicity is studied.

[0184] The individual antibodies are selected to meet two criteria. (1) Tissue staining appropriate for the known expression of the antibody target. (2) Similar staining pattern between human and tox species tissues from the same organ.

[0185] Criterion 1: Immunizations and/or antibody selections typically employ recombinant or synthesized antigens (proteins, carbohydrates or other molecules). Binding to the natural counterpart and counterscreen against unrelated antigens are often part of the screening funnel for therapeutic antibodies. However, screening against a multitude of antigens is often unpractical. Therefore tissue cross-reactivity studies with human tissues from all major organs serve to rule out unwanted binding of the antibody to any unrelated antigens.

[0186] Criterion 2: Comparative tissue cross reactivity studies with human and tox species tissues (cynomolgus monkey, dog, possibly rodents and others, the same 36 or 37 tissues are being tested as in the human study) help to validate the selection of a tox species. In the typical tissue cross-reactivity studies on frozen tissues sections therapeutic antibodies may demonstrate the expected binding to the known antigen and/or to a lesser degree binding to tissues based either on low level interactions (unspecific binding, low level binding to similar antigens, low level charge based interactions etc.). In any case the most relevant toxicology animal species is the one with the highest degree of coincidence of binding to human and animal tissue.

[0187] Tissue cross reactivity studies follow the appropriate regulatory guidelines including EC CPMP Guideline III/5271/94 “Production and quality control of mAbs” and the 1997 US FDA/CBER “Points to Consider in the Manufacture and Testing of Monoclonal Antibody Products for Human Use”. Cryosections (5 μm) of human tissues obtained at autopsy or biopsy were fixed and dried on object glass. The peroxidase staining of tissue sections was performed, using the avidin-biotin system. FDA's Guidance “Points to Consider in the Manufacture and Testing of Monoclonal Antibody Products for Human Use”. Relevant references include Clarke J 2004, Boon L. 2002a, Boon L 2002b, Ryan A 1999.

[0188] Tissue cross reactivity studies are often done in two stages, with the first stage including cryosections of 32 tissues (typically: Adrenal Gland, Gastrointestinal Tract, Prostate, Bladder, Heart, Skeletal Muscle, Blood Cells, Kidney, Skin, Bone Marrow, Liver, Spinal Cord, Breast, Lung, Spleen, Cerebellum, Lymph Node, Testes, Cerebral Cortex, Ovary, Thymus, Colon, Pancreas, Thyroid, Endothelium, Parathyroid, Ureter, Eye, Pituitary, Uterus, Fallopian Tube and Placenta) from one human donor. In the second phase a full cross reactivity study is performed with up to 38 tissues (including adrenal, blood, blood vessel, bone marrow, cerebellum, cerebrum, cervix, esophagus, eye, heart, kidney, large intestine, liver, lung, lymph node, breast mammary gland, ovary, oviduct, pancreas, parathyroid, peripheral nerve, pituitary, placenta, prostate, salivary gland, skin, small intestine, spinal cord, spleen, stomach, striated muscle, testis, thymus, thyroid, tonsil, ureter, urinary bladder, and uterus) from 3 unrelated adults. Studies are done typically at minimally two dose levels.

[0189] The therapeutic antibody (i.e. test article) and isotype matched control antibody may be biotinylated for avidin-biotin complex (ABC) detection; other detection methods may include tertiary antibody detection for a FITC (or otherwise) labeled test article, or precomplexing with a labeled anti-human IgG for an unlabeled test article.

[0190] Briefly, cryosections (about 5 μm) of human tissues obtained at autopsy or biopsy are fixed and dried on object glass. The peroxidase staining of tissue sections is performed, using the avidin-biotin system. First (in case of a precomplexing detection system), the test article is incubated with the secondary biotinylated anti-human IgG and developed into immune complex. The immune complex at the final concentrations of 2 and 10 μg/mL of test article is added onto tissue sections on object glass and then the tissue sections were reacted for 30 minutes with a avidin-biotin-peroxidase kit. Subsequently, DAB (3,3′-diaminobenzidine), a substrate for the peroxidase reaction, was applied for 4 minutes for tissue staining. Antigen-Sepharose beads are used as positive control tissue sections.

[0191] Any specific staining is judged to be either an expected (e.g., consistent with antigen expression) or unexpected reactivity based upon known expression of the target antigen in question. Any staining judged specific is scored for intensity and frequency. Antigen or serum competition or blocking studies can assist further in determining whether observed staining is specific or nonspecific.

[0192] If two selected antibodies are found to meet the selection criteria—appropriate tissue staining, matching staining between human and toxicology animal specific tissue—they can be selected for DVD-Ig generation.

[0193] The tissue cross reactivity study has to be repeated with the final DVD-Ig construct, but while these studies follow the same protocol as outline herein, they are more complex to evaluate because any binding can come from any of the two parent antibodies, and any unexplained binding needs to be confirmed with complex antigen competition studies.

[0194] It is readily apparent that the complex undertaking of tissue crossreactivity studies with a multispecific molecule like a DVD-Ig is greatly simplified if the two parental antibodies are selected for (1) lack of unexpected tissue cross reactivity findings and (2) for appropriate similarity of tissue cross reactivity findings between the corresponding human and toxicology animal species tissues.

### B.12 Specificity and Selectivity

[0195] To generate a DVD-Ig molecule with desired specificity and selectivity, one needs to generate and select parent mAbs with the similarly desired specificity and selectivity profile.

[0196] Binding studies for specificity and selectivity with a DVD-Ig can be complex due to the four or more binding sites, two each for each antigen. Briefly, binding studies using ELISA, BIAcore. KinExA or other interaction studies with a DVD-Ig need to monitor the binding of one, two or more antigens to the DVD-Ig molecule. While BIAcore technology can resolve the sequential, independent binding of multiple antigens, more traditional methods including ELISA or more modern techniques like KinExA cannot. Therefore careful characterization of each parent antibody is critical. After each individual antibody has been characterized for specificity, confirmation of specificity retention of the individual binding sites in the DVD-Ig molecule is greatly simplified.

[0197] It is readily apparent that the complex undertaking of determining the specificity of a DVD-Ig is greatly simplified if the two parental antibodies are selected for specificity prior to being combined into a DVD-Ig.

[0198] Antigen-antibody interaction studies can take many forms, including many classical protein interaction studies, including ELISA (Enzyme linked immunosorbent assay), Mass spectrometry, chemical cross linking, SEC with light scattering, equilibrium dialysis, gel permeation, ultrafiltration, gel chromatography, large-zone analytical SEC, micropreparative ultracentrigugation (sedimentation equilibrium), spectroscopic methods, titration microcalorimetry, sedimentation equilibrium (in analytical ultracentrifuge), sedimentation velocity (in analytical centrifuge), surface plasmon resonance (including BIAcore). Relevant references include “Current Protocols in Protein Science”, John E. Coligan, Ben M. Dunn, David W. Speicher, Paul T, Wingfield (eds.) Volume 3, chapters 19 and 20, published by John Wiley & Sons Inc., and references included therein and “Current Protocols in Immunology”, John E. Coligan, Barbara E. Bierer, David H. Margulies, Ethan M. Shevach, Warren Strober (eds.) published by John Wiley & Sons Inc and relevant references included therein.

[0199] Cytokine Release in Whole Blood: The interaction of mAb with human blood cells can be investigated by a cytokine release assay (Wing, M. G. Therapeutic Immunology (1995), 2(4), 183-190; “Current Protocols in Pharmacology”, S. J. Enna, Michael Williams, John W. Ferkany, Terry Kenakin, Paul Moser, (eds.) published by John Wiley & Sons Inc; Madhusudan, S. Clinical Cancer Research (2004), 10(19), 6528-6534; Cox, J. Methods (2006), 38(4), 274-282; Choi, I. European Journal of Immunology (2001), 31(1), 94-106). Briefly, various concentrations of mAb are incubated with human whole blood for 24 hours. The concentration tested should cover a wide range including final concentrations mimicking typical blood levels in patients (including but not limited to 100 ng/ml-100 μg/ml). Following the incubation, supernatants and cell lysates were analyzed for the presence of IL-1Rα, TNF-α, IL-1b, IL-6 and IL-8. Cytokine concentration profiles generated for mAb were compared to profiles produced by a negative human IgG control and a positive LPS or PHA control. The cytokine profile displayed by mAb from both cell supernatants and cell lysates was comparable to control human IgG. In an embodiment, the monoclonal antibody does not interact with human blood cells to spontaneously release inflammatory cytokines.

[0200] Cytokine release studies for a DVD-Ig are complex due to the four or more binding sites, two each for each antigen. Briefly, cytokine release studies as described herein measure the effect of the whole DVD-Ig molecule on whole blood or other cell systems, but can resolve which portion of the molecule causes cytokine release. Once cytokine release has been detected, the purity of the DVD-Ig preparation has to be ascertained, because some co-purifying cellular components can cause cytokine release on their own. If purity is not the issue, fragmentation of DVD-Ig (including but not limited to removal of Fc portion, separation of binding sites etc.), binding site mutagenesis or other methods may need to be employed to deconvolute any observations. It is readily apparent that this complex undertaking is greatly simplified if the two parental antibodies are selected for lack of cytokine release prior to being combined into a DVD-Ig.

### B.13 Cross Reactivity to Other Species for Toxicological Studies

[0201] In an embodiment, the individual antibodies selected with sufficient cross-reactivity to appropriate tox species, for example, cynomolgus monkey. Parental antibodies need to bind to orthologous species target (i.e. cynomolgus monkey) and elicit appropriate response (modulation, neutralization, activation). In an embodiment, the cross-reactivity (affinity/potency) to orthologous species target should be within 10-fold of the human target. In practice, the parental antibodies are evaluated for multiple species, including mouse, rat, dog, monkey (and other non-human primates), as well as disease model species (i.e. sheep for asthma model). The acceptable cross-reactivity to tox species from the perantal monoclonal antibodies allows future toxicology studies of DVD-Ig-Ig in the same species. For that reason, the two parental monoclonal antibodies should have acceptable cross-reactivity for a common tox species therefore allowing toxicology studies of DVD-Ig in the same species.

[0202] Parent mAbs may be selected from various mAbs capable of binding specific targets and well known in the art. These include, but are not limited to anti-TNF antibody (U.S. Pat. No. 6,258,562), anti-IL-12 and/or anti-IL-12p40 antibody (U.S. Pat. No. 6,914,128); anti-M-18 antibody (US 2005/0147610 Al), anti-05, anti-CBL, anti-CD147, anti-gp120, anti-VLA-4, anti-CD11a, anti-CD18, anti-VEGF, anti-CD40L, anti CD-40 (e.g., see WO2007124299) anti-Id, anti-ICAM-1, anti-CXCL13, anti-CD2, anti-EGFR, anti-TGF-beta 2, anti-HGF, anti-cMet, anti DLL-4, anti-NPR1, anti-PLGF, anti-ErbB3, anti-E-selectin, anti-Fact VII, anti-Her2/neu, anti-F gp, anti-CD11/18, anti-CD14, anti-ICAM-3, anti-RON, anti CD-19, anti-CD80 (e.g., see WO2003039486, anti-CD4, anti-CD3, anti-CD23, anti-beta2-integrin, anti-alpha4beta7, anti-CD52, anti-HLA DR, anti-CD22 (e.g., see U.S. Pat. No. 5,789,554), anti-CD20, anti-MIF, anti-CD64 (FcR), anti-TCR alpha beta, anti-CD2, anti-Hep B, anti-CA 125, anti-EpCAM, anti-gp120, anti-CMV, anti-IgE, anti-CD25, anti-CD33, anti-HLA, anti-IGF1,2, anti IGFR, anti-VNRintegrin, anti-IL-1alpha, anti-IL-1beta, anti-IL-1 receptor, anti-IL-2 receptor, anti-IL-4, anti-IL-4 receptor, anti-M5, anti-IL-5 receptor, anti-IL-6, anti-IL-6R, RANKL, NGF, DKK, alphaVbeta3, IL-17A, anti-IL-8, anti-IL-9, anti-IL-13, anti-IL-13 receptor, anti-IL-17, and anti-IL-23; IL-23p19; anti-MTX; anti-NKG2D; (see Presta LG. 2005 Selection, design, and engineering of therapeutic antibodies J Allergy Clin Immunol. 116:731-6 and http://www.path.cam.ac.uk/˜mrc7/humanisation/antibodies.html).

[0203] Parent mAbs may also be selected from various therapeutic antibodies approved for use, in clinical trials, or in development for clinical use. Such therapeutic antibodies include, but are not limited to, rituximab (Rituxan®, IDEC/Genentech/Roche) (see for example U.S. Pat. No. 5,736,137), a chimeric anti-CD20 antibody approved to treat Non-Hodgkin's lymphoma; HuMax-CD20, an anti-CD20 currently being developed by Genmab, an anti-CD20 antibody described in U.S. Pat. No. 5,500,362, AME-133 (Applied Molecular Evolution), hA20 (Immunomedics, Inc.), HumaLYM (Intracel), and PRO70769 (PCT/US2003/040426, entitled “Immunoglobulin Variants and Uses Thereof”), trastuzumab (Herceptin®, Genentech) (see for example U.S. Pat. No. 5,677,171), a humanized anti-Her2/neu antibody approved to treat breast cancer; pertuzumab (rhuMab-2C4, Omnitarg®), currently being developed by Genentech; an anti-Her2 antibody described in U.S. Pat. No. 4,753,894; cetuximab (Erbitux®, Imclone) (U.S. Pat. No. 4,943,533; PCT WO 96/40210), a chimeric anti-EGFR antibody in clinical trials for a variety of cancers; ABX-EGF (U.S. Pat. No. 6,235,883), currently being developed by Abgenix-Immunex-Amgen; HuMax-EGFr (U.S. Ser. No. 10/172,317), currently being developed by Genmab; 425, EMD55900, EMD62000, and EMD72000 (Merck KGaA) (U.S. Pat. No. 5,558,864; Murthy et al. 1987, Arch Biochem Biophys. 252(2):549-60; Rodeck et al., 1987, J Cell Biochem. 35(4):315-20; Kettleborough et al., 1991, Protein Eng. 4(7):773-83); ICR62 (Institute of Cancer Research) (PCT WO 95/20045; Modjtahedi et al., 1993, J. Cell Biophys. 1993, 22(1-3):129-46; Modjtahedi et al., 1993, Br J Cancer. 1993, 67(2):247-53; Modjtahedi et al, 1996, Br J Cancer, 73(2):228-35; Modjtahedi et al, 2003, Int J Cancer, 105(2):273-80); TheraCiM hR3 (YM Biosciences, Canada and Centro de Immunologia Molecular, Cuba (U.S. Pat. No. 5,891,996; U.S. Pat. No. 6,506,883; Mateo et al, 1997, Immunotechnology, 3(1):71-81); mAb-806 (Ludwig Institue for Cancer Research, Memorial Sloan-Kettering) (Jungbluth et al. 2003, Proc Natl Acad Sci USA. 100(2):639-44); KSB-102 (KS Biomedix); MR1-1 (WAX, National Cancer Institute) (PCT WO 0162931A2); and SC100 (Seamen) (PCT WO 01/88138); alemtuzumab (Campath®, Millenium), a humanized mAb currently approved for treatment of B-cell chronic lymphocytic leukemia; muromonab-CD3 (Orthoclone OKT3®), an anti-CD3 antibody developed by Ortho Biotech/Johnson & Johnson, ibritumomab tiuxetan (Zevalin®), an anti-CD20 antibody developed by IDEC/Schering AG, gemtuzumab ozogamicin (Mylotarg®), an anti-CD33 (p67 protein) antibody developed by Celltech/Wyeth, alefacept (Amevive®), an anti-LFA-3 Fc fusion developed by Biogen), abciximab (ReoPro®), developed by Centocor/Lilly, basiliximab (Simulect®), developed by Novartis, palivizumab (Synagis®), developed by Medimmune, infliximab (Remicade®), an anti-TNFalpha antibody developed by Centocor, adalimumab (Humira®), an anti-TNFalpha antibody developed by Abbott, Humicade®, an anti-TNFalpha antibody developed by Celltech, golimumab (CNTO-148), a fully human TNF antibody developed by Centocor, etanercept (Enbrel®), an p75 TNF receptor Fc fusion developed by Immunex/Amgen, lenercept, an p55TNF receptor Fc fusion previously developed by Roche, ABX-CBL, an anti-CD147 antibody being developed by Abgenix, ABX-IL8, an anti-IL8 antibody being developed by Abgenix, ABX-MAI, an anti-MUC18 antibody being developed by Abgenix, Pemtumomab (R1549,90Y-muHMFG1), an anti-MUC1 in development by Anti soma, Therex (R1550), an anti-MUC1 antibody being developed by Antisoma, AngioMab (AS1405), being developed by Antisoma, HuBC-1, being developed by Antisoma, Thioplatin (AS1407) being developed by Antisoma, Antegren® (natalizumab), an anti-alpha-4-beta-1 (VLA-4) and alpha-4-beta-7 antibody being developed by Biogen, VLA-1 mAb, an anti-VLA-1 integrin antibody being developed by Biogen, LTBR mAb, an anti-lymphotoxin beta receptor (LTBR) antibody being developed by Biogen, CAT-152, an anti-TGF-β2 antibody being developed by Cambridge Antibody Technology, ABT 874 (J695), an anti-IL-12 p40 antibody being developed by Abbott, CAT-192, an anti-TGFβ1 antibody being developed by Cambridge Antibody Technology and Genzyme, CAT-213, an anti-Eotaxin1 antibody being developed by Cambridge Antibody Technology, LymphoStat-B® an anti-Blys antibody being developed by Cambridge Antibody Technology and Human Genome Sciences Inc., TRAIL-R1 mAb, an anti-TRAIL-R1 antibody being developed by Cambridge Antibody Technology and Human Genome Sciences, Inc., Avastin® bevacizumab, rhuMAb-VEGF), an anti-VEGF antibody being developed by Genentech, an anti-HER receptor family antibody being developed by Genentech, Anti-Tissue Factor (ATF), an anti-Tissue Factor antibody being developed by Genentech, Xolair® (Omalizumab), an anti-IgE antibody being developed by Genentech, Raptiva® (Efalizumab), an anti-CD11a antibody being developed by Genentech and Xoma, MLN-02 Antibody (formerly LDP-02), being developed by Genentech and Millenium Pharmaceuticals, HuMax CD4, an anti-CD4 antibody being developed by Genmab, HuMax-IL15, an anti-IL15 antibody being developed by Genmab and Amgen, HuMax-Inflam, being developed by Genmab and Medarex, HuMax-Cancer, an anti-Heparanase I antibody being developed by Genmab and Medarex and Oxford GcoSciences, HuMax-Lymphoma, being developed by Genmab and Amgen, HuMax-TAC, being developed by Genmab, IDEC-131, and anti-CD40L antibody being developed by IDEC Pharmaceuticals, IDEC-151 (Clenoliximab), an anti-CD4 antibody being developed by DEC Pharmaceuticals, IDEC-114, an anti-CD80 antibody being developed by DEC Pharmaceuticals, IDEC-152, an anti-CD23 being developed by IDEC Pharmaceuticals, anti-macrophage migration factor (MIF) antibodies being developed by DEC Pharmaceuticals, BEC2, an anti-idiotypic antibody being developed by Imclone, IMC-1C11, an anti-KDR antibody being developed by Imclone, DC101, an anti-flk-1 antibody being developed by Imclone, anti-VE cadherin antibodies being developed by Imclone, CEA-Cide® (labetuzumab), an anti-carcinoembryonic antigen (CEA) antibody being developed by Immunomedics, LymphoCide® (Epratuzumab), an anti-CD22 antibody being developed by Immunomedics, AFP-Cide, being developed by Immunomedics, MyelomaCide, being developed by Immunomedics, LkoCide, being developed by Immunomedics, ProstaCide, being developed by Immunomedics, MDX-010, an anti-CTLA4 antibody being developed by Medarex, MDX-060, an anti-CD30 antibody being developed by Medarex, MDX-070 being developed by Medarex, MDX-018 being developed by Medarex, Osidem® (IDM-1), and anti-Her2 antibody being developed by Medarex and Immuno-Designed Molecules, HuMax®-CD4, an anti-CD4 antibody being developed by Medarex and Genmab, HuMax-IL15, an anti-IL15 antibody being developed by Medarex and Genmab, CNTO 148, an anti-TNFα antibody being developed by Medarex and Centocor/J&J, CNTO 1275, an anti-cytokine antibody being developed by Centocor/J&J, MOR101 and MOR102, anti-intercellular adhesion molecule-1 (ICAM-1) (CD54) antibodies being developed by Morph® Sys, MOR201, an anti-fibroblast growth factor receptor 3 (FGFR-3) antibody being developed by MorphoSys, Nuvion® (visilizumab), an anti-CD3 antibody being developed by Protein Design Labs, HuZAF®, an anti-gamma interferon antibody being developed by Protein Design Labs, Anti-a 5131 Integrin, being developed by Protein Design Labs, anti-IL-12, being developed by Protein Design Labs, ING-1, an anti-Ep-CAM antibody being developed by Xoma, Xolair® (Omalizumab) a humanized anti-IgE antibody developed by Genentech and Novartis, and MLN01, an anti-Beta2 integrin antibody being developed by Xoma, all of the herein-cited references in this paragraph are expressly incorporated herein by reference. In another embodiment, the therapeutics include KRN330 (Kirin); huA33 antibody (A33, Ludwig Institute for Cancer Research); CNTO 95 (alpha V integrins, Centocor); MEDI-522 (alpha Vβ3 integrin, Medimmune); volociximab (alpha Vβ1 integrin, Biogen/PDL); Human mAb 216 (B cell glycosolated epitope, NCI); BiTE MT103 (bispecific CD19×CD3, Medimmune); 4G7×H22 (Bispecific Bcell×FcgammaR1, Medarex/Merck KGa); rM28 (Bispecific CD28×MAPG, US Patent No. EP1444268); MDX447 (EMD 82633) (Bispecific CD64×EGFR, Medarex); Catumaxomab (removab) (Bispecific EpCAM×anti-CD3, Trion/Fres); Ertumaxomab (bispecific HER2/CD3, Fresenius Biotech); oregovomab (OvaRex) (CA-125, ViRexx); Rencarex® (WX G250) (carbonic anhydrase IX, Wilex); CNTO 888 (CCL2, Centocor); TRC 105 (CD 105 (endoglin), Tracon); BMS-663513 (CD137 agonist, Brystol Myers Squibb); MDX-1342 (CD19, Medarex); Siplizumab (MEDI-507) (CD2, Medimmune); Ofatumumab (Humax-CD20) (CD20, Genmab); Rituximab (Rituxan) (CD20, Genentech); veltuzumab (hA20) (CD20, Immunomedics); Epratuzumab (CD22, Amgen); lumiliximab (IDEC 152) (CD23, Biogen); muromonab-CD3 (CD3, Ortho); HuM291 (CD3 fc receptor, PDL Biopharma); HeFi-1, CD30, NCI); MDX-060 (CD30, Medarex); MDX-1401 (CD30, Medarex); SGN-30 (CD30, Seattle Genentics); SGN-33 (Lintuzumab) (CD33, Seattle Genentics); Zanolimumab (HuMax-CD4) (CD4, Genmab); HCD122 (CD40, Novartis); SGN-40 (CD40, Seattle Genentics); Campath1h (Alemtuzumab) (CD52, Genzyme); MDX-1411 (CD70, Medarex); hLL1 (EPB-1) (CD74.38, Immunomedics); Galiximab (IDEC-144) (CD80, Biogen); MT293 (TRC093/D93) (cleaved collagen, Tracon); HuLuc63 (CS1, PDL Pharma); ipilimumab (MDX-010) (CTLA4, Brystol Myers Squibb); Tremelimumab (Ticilimumab, CP-675,2) (CTLA4, Pfizer); HGS-ETR1 (Mapatumumab) (DR4 TRAIL-R1 agonist, Human Genome Science/Glaxo Smith Kline); AMG-655 (DR5, Amgen); Apomab (DR5, Genentech); CS-1008 (DR5, Daiichi Sankyo); HGS-ETR2 (lexatumumab) (DRS TRAIL-R2 agonist, HGS); Cetuximab (Erbitux) (EGFR, Imclone); IMC-11F8, (EGFR, Imclone); Nimotuzumab (EGFR, YM Bio); Panitumumab (Vectabix) (EGFR, Amgen); Zalutumumab (HuMaxEGFr) (EGFR, Genmab); CDX-110 (EGFRvIII, AVANT Immunotherapeutics); adecatumumab (MT201) (Epcam™, Merck); edrecolomab (Panorex, 17-1A) (Epcam™, Glaxo/Centocor); MORAb-003 (folate receptor a, Morphotech); KW-2871 (ganglioside GD3, Kyowa); MORAb-009 (GP-9, Morphotech); CDX-1307 (MDX-1307) (hCGb, Celldex); Trastuzumab (Herceptin) (HER2, Celldex); Pertuzumab (rhuMAb 2C4) (HER2 (DI), Genentech); apolizumab (HLA-DR beta chain, PDL Pharma); AMG-479 (IGF-1R, Amgen); anti-IGF-1R R1507 (IGF1-R, Roche); CP 751871 (IGF1-R, Pfizer); IMC-A12 (IGF1-R, Imclone); B11B022 (IGF-1R, Biogen); Mik-beta-1 (IL-2Rb (CD122), Hoffman LaRoche); CNTO 328 (IL6, Centocor); Anti-KIR (1-7F9) (Killer cell Ig-like Receptor (KIR), Novo); Hu3S193 (Lewis (y), Wyeth, Ludwig Institute of Cancer Research); hCBE-11 (LTBR, Biogen); HuHMFG1 (MUC1, Antisoma/NCI); RAV12 (N-linked carbohydrate epitope, Raven); CAL (parathyroid hormone-related protein (PTH-rP), University of California); CT-011 (PD1, CureTech); MDX-1106 (ono-4538) (PD1, Medarex/Ono); MAb CT-011 (PD1, Curetech); IMC-3G3 (PDGFRa, Imclone); bavituximab (phosphatidylserine, Peregrine); huJ591 (PSMA, Cornell Research Foundation); muJ591 (PSMA, Cornell Research Foundation); GC1008 (TGFb (pan) inhibitor (IgG4), Genzyme); Infliximab (Remicade) (TNFα, Centocor); A27.15 (transferrin receptor, Salk Institute, INSERN WO 2005/111082); E2.3 (transferrin receptor, Salk Institute); Bevacizumab (Avastin) (VEGF, Genentech); HuMV833 (VEGF, Tsukuba Research Lab-WO/2000/034337, University of Texas); IMC-18F1 (VEGFR1, Imclone); IMC-1121 (VEGFR2, Imclone).

### C. Construction of DVD Molecules

[0204] The dual variable domain immunoglobulin (DVD-Ig) molecule is designed such that two different light chain variable domains (VL) from the two different parent monoclonal antibodies are linked in tandem directly or via a short linker by recombinant DNA techniques, followed by the light chain constant domain. Similarly, the heavy chain comprises two different heavy chain variable domains (VH) linked in tandem, followed by the constant domain CH1 and Fc region (FIG. 1A).

[0205] The variable domains can be obtained using recombinant DNA techniques from a parent antibody generated by any one of the methods described herein. In an embodiment, the variable domain is a murine heavy or light chain variable domain. In another embodiment, the variable domain is a CDR grafted or a humanized variable heavy or light chain domain. In an embodiment, the variable domain is a human heavy or light chain variable domain.

[0206] In one embodiment the first and second variable domains are linked directly to each other using recombinant DNA techniques. In another embodiment the variable domains are linked via a linker sequence. In an embodiment, two variable domains are linked. Three or more variable domains may also be linked directly or via a linker sequence. The variable domains may bind the same antigen or may bind different antigens. In some embodiments, the DVD molecules may include one immunoglobulin variable domain and one non-immunoglobulin variable domain such as ligand binding domain of a receptor, active domain of an enzyme. DVD molecules may also comprise 2 or more non-Ig domains.

[0207] The linker sequence may be a single amino acid or a polypeptide sequence. In an embodiment, the linker sequences are AKTTPKLEEGEFSEAR (SEQ ID NO: 1); AKTTPKLEEGEFSEARV (SEQ ID NO: 2); AKTTPKLGG (SEQ ID NO: 3); SAKTTPKLGG (SEQ ID NO: 4); SAKTTP (SEQ ID NO: 5); RADAAP (SEQ ID NO: 6); RADAAPTVS (SEQ ID NO: 7); RADAAAAGGPGS (SEQ ID NO: 8); RADAAAA(G₄S)₄ (SEQ ID NO: 9), SAKTTPKLEEGEFSEARV (SEQ ID NO: 10); ADAAP (SEQ ID NO: 11); ADAAPTVSIFPP (SEQ ID NO: 12); TVAAP (SEQ ID NO: 13); TVAAPSVFIFPP (SEQ ID NO: 14); QPKAAP (SEQ ID NO: 15); QPKAAPSVTLFPP (SEQ ID NO: 16); AKTTPP (SEQ ID NO: 17); AKTTPPSVTPLAP (SEQ ID NO: 18); AKTTAP (SEQ ID NO: 19); AKTTAPSVYPLAP (SEQ ID NO: 20); ASTKGP (SEQ ID NO: 21); ASTKGPSVFPLAP (SEQ ID NO: 22), GGGGSGGGGSGGGGS (SEQ ID NO: 23); GENKVEYAPALMALS (SEQ ID NO: 24); GPAKELTPLKEAKVS (SEQ ID NO: 25); or GHEAAAVMQVQYPAS (SEQ ID NO: 26). The choice of linker sequences is based on crystal structure analysis of several Fab molecules. There is a natural flexible linkage between the variable domain and the CH1/CL constant domain in Fab or antibody molecular structure. This natural linkage comprises approximately 10-12 amino acid residues, contributed by 4-6 residues from C-terminus of V domain and 4-6 residues from the N-terminus of CL/CH1 domain. DVD Igs were generated using N-terminal 5-6 amino acid residues, or 11-12 amino acid residues, of CL or CH1 as linker in light chain and heavy chain of DVD-Ig, respectively. The N-terminal residues of CL or CH1 domains, particularly the first 5-6 amino acid residues, adopt a loop conformation without strong secondary structures, therefore can act as flexible linkers between the two variable domains. The N-terminal residues of CL or CH1 domains are natural extension of the variable domains, as they are part of the Ig sequences, therefore minimize to a large extent any immunogenicity potentially arising from the linkers and junctions.

[0208] Other linker sequences may include any sequence of any length of CL/CH1 domain but not all residues of CL/CH1 domain; for example the first 5-12 amino acid residues of the CL/CH1 domains; the light chain linkers can be from CK or CA.; and the heavy chain linkers can be derived from CH1 of any isotypes, including Cγ1, Cγ2, Cγ3, Cγ4, Cα1, Cα2, Cδ, Cε, and Cμ. Linker sequences may also be derived from other proteins such as Ig-like proteins, (e.g. TCR, FcR, KIR); G/S based sequences (e.g G4S repeats; SEQ ID NO: 27); hinge region-derived sequences; and other natural sequences from other proteins.

[0209] In an embodiment a constant domain is linked to the two linked variable domains using recombinant DNA techniques. In an embodiment, sequence comprising linked heavy chain variable domains is linked to a heavy chain constant domain and sequence comprising linked light chain variable domains is linked to a light chain constant domain. In an embodiment, the constant domains are human heavy chain constant domain and human light chain constant domain respectively. In an embodiment, the DVD heavy chain is further linked to an Fc region. The Fc region may be a native sequence Fc region, or a variant Fc region. In another embodiment, the Fc region is a human Fc region. In another embodiment the Fc region includes Fc region from IgG1, IgG2, IgG3, IgG4, IgA, IgM, IgE, or IgD.

[0210] In another embodiment two heavy chain DVD polypeptides and two light chain DVD polypeptides are combined to form a DVD-Ig molecule. Table 2 lists amino acid sequences of VH and VL regions of exemplary antibodies for targets useful for treating disease, e.g., for treating cancer. In an embodiment, a DVD comprising at least two of the VH and/or VL regions listed in Table 2, in any orientation is provided. In some embodiments, VD1 and VD2 are independently chosen. Therefore, in some embodiments, VD1 and VD2 comprise the same SEQ ID NO and, in other embodiments, VD1 and VD2 comprise different SEQ ID NOS. The VH and VL domain sequences provided below comprise complementary determining region (CDR) and framework sequences that are either known in the art or readily discernable using methods known in the art. In some embodiments, one or more of these CDR and/or framework sequences are replaced, without loss of function, by other CDR and/or framework sequences from binding proteins that are known in the art to bind to the same antigen.

TABLE 2

List of Amino Acid Sequences of VH and VL regions of Antibodies
for Generating DVD-Igs

| | ABT | | |
|---|---|---|---|
| SEQ ID | Unique | Protein | Sequence |
| No. | ID | region | 1234567890123456789012345678901234567890 |
| 28 | AB001VH | VH-CD20 | QVQLQQPGAELVKPGASVKMSCKASGYTFTSYNMHWVKQT |
| | | | PGRGLEWIGAIYPGNGDTSYNQKFKGKATLTADKSSSTAY |
| | | | MQLSSLTSEDSAVYYCARSTYYGGDWYFNVWGAGTTVTVS |
| | | | A |
| 29 | AB001VL | VL-CD20 | QIVLSQSPAILSPSPGEKVTMTCRASSSVSYIHWFQQKPG |
| | | | SSPKPWIYATSNLASGVPVRFSGSGSGTSYSLTISRVEAE |
| | | | DAATYYCQQWTSNPPTFGGGTKLEIKR |
| 30 | AB002VH | VH-CD3 | QVQLQQSGAELARPGASVKMSCKASGYTFTRYTMHWVKQR |
| | | (seq. 1) | PGQGLEWIGYINPSRGYTNYNQKFKDKATLTTDKSSSTAY |
| | | | MQLSSLTSEDSAVYYCARYYDDHYCLDYWGQGTTLTVSS |
| 31 | AB002VL | VL-CD3 | QIVLTQSPAIMSASPGEKVTMTCRASSSVSYMNWYQQKSG |
| | | (seq. 1) | TSPKRWIYDTSKVASGVPYRFSGSGSGTSYSLTISSMEAE |
| | | | DAATYYCQQWSSNPLTFGSGTKLEINR |
| 32 | AB003VH | VH-EGFR | QVQLQESGPGLVKPSETLSLTCTVSGGSVSSGDYYWTWIR |
| | | (seq. 1) | QSPGKGLEWIGHIYYSGNTNYNPSLKSRLTISIDTSKTQF |
| | | | SLKLSSVTAADTAIYYCVRDRVTGAFDIWGQGTMVTVSS |
| 33 | AB003VL | VL-EGFR | DIQMTQSPSSLSASVGDRVTITCQASQDISNYLNWYQQKP |
| | | (seq. 1) | GKAPKLLIYDASNLETGVPSRFSGSGSGTDFTFTISSLQP |
| | | | EDIATYFCQHFDHLPLAFGGGTKVEIKR |
| 34 | AB004VH | VH-HER2 | EVQLVESGGGLVQPGGSLRLSCAASGFNIKDTYIHWVRQA |
| | | | PGKGLEWVARIYPTNGYTRYADSVKGRFTISADTSKNTAY |
| | | | LQMNSLRAEDTAVYYCSRWGGDGFYAMDYWGQGTLVTVSS |
| 35 | AB004VL | VL-HER2 | DIQMTQSPSSLSASVGDRVTITCRASQDVNTAVAWYQQKP |
| | | | GKAPKLLIYSASFLYSGVPSRFSGSRSGTDFTLTISSLQP |
| | | | EDFATYYCQQHYTTPPTFGQGTKVEIKR |
| 36 | AB005VH | VH-RON | EVQLVQSGGGLVKPGGSLRLSCAASGFTFSSYAMHWVRQA |
| | | (seq. 1) | PGKGLEWVAVISYDGSNKYYADSVKGRFTISRDNSKNTLY |
| | | | LQMNSLRAEDTAVYYCARFSGWPNNYYYYGMDVWGQGTTV |
| | | | TVSS |
| 37 | AB005VL | VL-RON | DVVMTQSPLSLPVTPGEPASISCRSSQSLLHSNGFNYVDW |
| | | (seq. 1) | YLQKPGQSPHLLIYFGSYRASGVPDRFSGSGSGTDFTLKI |
| | | | SRVEAEDVGVYYCMQALQTPPWTFGQGTKVEIRR |
| 38 | AB006VH | VH-CD19 | QVQLQQSGAELVRPGSSVKISCKASGYAFSSYWMNWVKQR |
| | | | PGQGLEWIGQIWPGDGDTNYNGKFKGKATLTADESSSTAY |
| | | | MQLSSLASEDSAVYFCARRETTTVGRYYYAMDYWGQGTSV |
| | | | TVSS |
| 39 | AB006VL | VL-CD19 | DILLTQTPASLAVSLGQRATISCKASQSVDYDGDSYLNWY |
| | | | QQIPGQPPKLLIYDASNLVSGIPPRFSGSGSGTDFTLNIH |
| | | | PVEKVDAATYHCQQSTEDPWTFGGGTKLEIKR |
| 40 | AB007VH | VH-CD80 | QVQLQESGPGLVKPSETLSLTCAVSGGSISGGYGWGWIRQ |
| | | | PPGKGLEWIGSFYSSSGNTYYNPSLKSQVTISTDTSKNQF |
| | | | SLKLNSMTAADTAVYYCVRDRLFSVVGMVYNNWFDVWGPG |
| | | | VLVTVSS |
| 41 | AB007VL | VL-CD80 | ESALTQPPSVSGAPGQKVTISCTGSTSNIGGYDLHWYQQL |
| | | | PGTAPKLLIYDINKRPSGISDRFSGSKSGTAASLAITGLQ |
| | | | TEDEADYYCQSYDSSLNAQVFGGGTRLTVLG |
| 42 | AB008VH | VH-CD22 | QVQLVQSGAEVKKPGSSVKVSCKASGYTFTSYWLHWVRQA |
| | | | PGQGLEWIGYINPRNDYTEYNQNFKDKATITADESTNTAY |
| | | | MELSSLRSEDTAFYFCARRDITTFYWGQGTTVTVSS |
| 43 | AB008VL | VL-CD22 | DIQLTQSPSSLSASVGDRVTMSCKSSQSVLYSANHKNYLA |
| | | | WYQQKPGKAPKLLIYWASTRESGVPSRFSGSGSGTDFTFT |
| | | | ISSLQPEDIATYYCHQYLSSWTFGGGTKLEIKR |
| 44 | AB009VH | VH-CD40 | QVQLVESGGGVVQPGRSLRLSCAASGFTFSSYGMHWVRQA |
| | | | PGKGLEWVAVISYEESNRYHADSVKGRFTISRDNSKITLY |
| | | | LQMNSLRTEDTAVYYCARDGGIAAPGPDYWGQGTLVTVSS |
| 45 | AB009VL | VL-CD40 | DIVMTQSPLSLTVTPGEPASISCRSSQSLLYSNGYNYLDW |
| | | | YLQKPGQSPQVLISLGSNRASGVPDRFSGSGSGTDFTLKI |
| | | | SRVEAEDVGVYYCMQARQTPFTFGPGTKVDIRR |
| 46 | AB010VH | VH-IGF1,2 | QVQLVQSGAEVKKPGASVKVSCKASGYTFTSYDINWVRQA |
| | | | TGQGLEWMGWMNPNSGNTGYAQKFQGRVTMTRNTSISTAY |
| | | | MELSSLRSEDTAVYYCARDPYYYYYGMDVWGQGTTVTVSS |
| 47 | AB010VL | VL-IGF1,2 | QSVLTQPPSVSAAPGQKVTISCSGSSSNIENNHVSWYQQL |
| | | | PGTAPKLLIYDNNKRPSGIPDRFSGSKSGTSATLGITGLQ |
| | | | TGDEADYYCETWDTSLSAGRVFGGGTKLTVLG |
| 48 | AB011VH | VH-IGF1R | EVQLLESGGGLVQPGGSLRLSCTASGFTFSSYAMNWVRQA |
| | | | PGKGLEWVSAISGSGGTTFYADSVKGRFTISRDNSRTTLY |
| | | | LQMNSLRAEDTAVYYCAKDLGWSDSYYYYYGMDVWGQGTT |
| | | | VTVSS |
| 49 | AB011VL | VL-IGF1R | DIQMTQFPSSLSASVGDRVTITCRASQGIRNDLGWYQQKP |
| | | | GKAPKRLIYAASRLHRGVPSRFSGSGSGTEFTLTISSLQP |
| | | | EDFATYYCLQHNSYPCSFGQGTKLEIKR |
| 50 | AB012VH | VH-HGF | QVQLVESGGGLVKPGGSLRLSCAASGFTFSDYYMSWIRQA |
| | | | PGKGLEWVSYISSSGSTIYYADSVKGRFTISRDNAKNSLY |
| | | | LQMNSLRAEDTAVYYCARDEYNSGWYVLFDYWGQGTLVTV |
| | | | SS |
| 51 | AB012VL | VL-HGF | DIQMTQSPSSVSASVGDRVTITCRASQGISSWLAWYQQKP |
| | | | GKAPNLLIYEASSLQSGVPSRFGGSGSGTDFTLTISSLQP |
| | | | EDFATYYCQQANGFPWTFGQGTKVEIKR |
| 52 | AB013VH | VH-cMET | QVQLQQSGPELVRPGASVKWSCPASGYTFTSYWLHWVKKQ |
| | | | RPGQGLEWIGMIDPSNSDTRFNPPNFKDKATLNVDRSSNT |
| | | | AYNLLSSLTSADSAVYYCATYGSYVSPLDYWGQGTSVYVS |
| | | | S |
| 53 | AB013VL | VL-cMET | DIMMSQSPSSLTVSVGEKVTVSCKSSQSLLVTSSQKNYLA |
| | | | WYQQKPQQSPKLLIYWASTRESGVPDRFTGSGSGTDFTLT |
| | | | ITSVKADDLAVYYCQQYYAYPWTFGDGTKLEIKR |
| 54 | AB014VH | VH-VEGF | EVQLVESGGGLVQPGGSLRLSCAASGYTFTNYGMNWVRQA |
| | | (seq. 1) | PGKGLEWVGWINTYTGEPTYAADFKRRFTFSLDTSKSTAY |
| | | | LQMNSLRAEDTAVYYCAKYPHYYGSSHWYFDVWGQGTLVT |
| | | | VSS |
| 55 | AB014VL | VL-VEGF | DIQMTQSPSSLSASVGDRVTITCSASQDISNYLNWYQQKP |
| | | (seq. 1) | GKAPKVLIYFTSSLHSGVPSRFSGSGSGTDFTLTISSLQP |
| | | | EDFATYYCQQYSTVPWTFGQGTKVEIKR |
| 56 | AB015VH | VH-DLL4 | EVQLVESGGGLVQPGGSLRLSCAASGFTFTDNWISWVRQA |
| | | | PGKGLEWVGYISPNSGFTYYADSVKGRFTISADTSKNTAY |
| | | | LQMNSLRAEDTAVYYCARDNFGGYFDYWGQGTLVTVSS |
| 57 | AB015VL | VL-DLL4 | DIQMTQSPSSLSASVGDRVTITCRASQDVSTAVAWYQQKP |
| | | | GKAPKLLIYSASFLYSGVPSRFSGSGSGTDFTLTISSLQP |
| | | | EDFATTYYCQQSYTGTVTFGQGTKVEIKR |
| 58 | AB016VH | VH-NRP1 | EVQLVESGGGLVQPGGSLRLSCAASGFSFSSEPISWVRQA |
| | | (seq. 1) | PGKGLEWVSSITGKNGYTYYADSVKGRFTISADTSKNTAY |
| | | | LQMNSLRAEDTAVYYCARWGKKVYGMDVWGQGTLVTVSS |
| 59 | AB016VL | VL-NRP1 | DIQMTQSPSSLSASVGDRVTITCRASQSISSYLAWYQQKP |
| | | (seq. 1) | GKAPKLLIYGASSRASGVPSRFSGSGSGTDFTLTISSLQP |
| | | | EDFATYYCQQYMSVPITFGQGTKVEIKR |
| 60 | AB020VH | VH-NGF | QVQLQESGPGLVKPSETLSLTCTVSGFSLIGYDLNWIRQP |
| | | (seq. 1) | PGKGLEWIGIIWGDGTTDYNSAVKSRVTISKDTSKNQFSL |
| | | | KLSSVTAADTAVYYCARGGYWYATSYYFDYWGQGTLVTVS |
| | | | S |
| 61 | AB020VL | VL-NGF | DIQMTQSPSSLSASVGDRVTITCRASQSISNNLNWYQQKP |
| | | (seq. 1) | GKAPKLLIYYTSRFHSGVPSRFSGSGSGTDFTFTISSLQP |
| | | | EDIATYYCQQEHTLPYTFGQGTKLEIKR |
| 62 | AB033VH | VH-EGFR | QVQLKQSGPGLVQPSQSLSITCTVSGFSLTNYGVHWVRQS |
| | | (seq. 2) | PGKGLEWLGVIWSGGNTDYNTPFTSRLSINKDNSKSQVFF |
| | | | KMNSLQSNDTAIYYCARALTYYDYEFAYWGQGTLVTVSA |
| 63 | AB033VL | VL-EGFR | DILLTQSPVILSVSPGERVSFSCRASQSIGTNIHWYQQRT |
| | | (seq. 2) | NGSPRLLIKYASESISGIPSRFSGSGSGTDFTLSINSVES |
| | | | EDIADYYCQQNNNWPTTFGAGTKLELKR |
| 64 | AB034VH | VH-RON | QVQLQESGPGLVKPSEILSLTCTVSGGSISSHYWSWVRQP |
| | | (seq. 2) | PGKGLEWIGYIYYSGSTNYNPSLKSRVTISVDTSKNQFSL |
| | | | NLSSVTAADTAVYYCARIPNYYDRSGYYPGYWYFDLWGRG |
| | | | TLVTVSS |
| 65 | AB034VL | VL-RON | QAVLTQPSSLSAPPGASASLTCTLRSGFNVDSYRISWYQQ |
| | | (seq. 2) | KPGSPPQYLLRYKSDSDKQQGSGVPSRFSGSKDASANAGI |
| | | | LLISGLQSEDEADYYCMIWHSSAWVFGGGTKLTVLR |
| 66 | AB035VH | VH-NRP1 | EVQLVESGGGLVQPGGSLRLSCAASGFTFSSYAMSWVRQA |
| | | (seq. 2) | PGKGLEWVSQISPAGGYTNYADSVKGRFTISADTSKNTAY |
| | | | LQMNSLRAEDTAVYYCARELPYYRMSKVMDVQGQGTLVTV |
| | | | SS |
| 67 | AB035VL | VL-NRP1 | DIQMTQSPSSLSASVGDRVTITCRASQYFSSYLAWYQQKP |
| | | (seq. 2) | GKAPKLLIYGASSRASGVPSRFSGSGSGTDFTLTISSLQP |
| | | | EDFATYYCQQYLGSPPTFGQGTKVEIKR |
| 68 | AB039VH | VH-CD3 | QVQLQQSGAELARPGASVKMSCKASGYTFTRYTMHWVKQR |
| | | (seq. 2) | PGQGLEWIGYINPSRGYTNYNQKFKDKATLTTDKSSSTAY |
| | | | MQLSSLTSEDSAVYYCARYYDDHYCLDYWGQGTTLTVSS |
| 69 | AB039VL | VL-CD3 | QIVLTQSPAIMSASPGEKVTMTCSASSSVSYMNWYQQKSG |
| | | (seq. 2) | TSPKRWIYDTSKLASGVPAHFRGSGSGTSYSLTISGMEAE |
| | | | DAATYYCQQWSSNPFTFGSGTKLEINR |
| 70 | AB047VH | VH-PlGF | QVQLQQSGAELVKPGASVKISCKASGYTFTDYYINWVKLA |
| | | | PGQGLEWIGWIYPGSGNTKYNEKFKGKATLTIDTSSSTAY |
| | | | MQLSSLTSEDTAVYFCVRDSPFFDYWGQGTLLTVSS |
| 71 | AB047VL | VL-PlGF | DIVLTQSPDSLAVSLGERVTMNCKSSQSLLNSGMRKSFLA |
| | | | WYQQKPGQSPKLLIYWASTRESGVPDRFTGSGSGTDFTLT |
| | | | ISSVQAEDVAVYYCKQSYHLFTFGSGTKLEIKR |
| 72 | AB062VH | VH-ERBB3 | QVQLQQWGAGLLKPSETLSLTCAVYGGSFSGYYWSWIRQP |
| | | (seq. 1) | PGKGLEWIGEINHSGSTNYNPSLKSRVTISVETSKNQFSL |
| | | | KLSSVTAADTAVYYCARDKWTWYFDLWGRGTLVTVSS |
| 73 | AB062VL | VL-ERBB3 | DIEMTQSPDSLAVSLGERATINCRSSQSVLYSSSNRNYLA |
| | | (seq. 1) | WYQQNPGQPPKLLIYWASTRESGVPDRFSGSGSGTDFTLT |
| | | | ISSLQAEDVAVYYCQQYYSTPRTFGQGTKVEIKR |
| 74 | AB063VH | VH-ERBB3 | EVQLVESGGGLVQPGGSLRLSCAASGFTFSIYSMNWVRQA |
| | | (seq. 2) | PGKGLEWVSYISSSSSTIYYADSVKGRFTISRDNAKNSLY |
| | | | LQMNSLRDEDTAVYYCARDRGDFDAFDIWGQGTMVTVSS |
| 75 | AB063VL | VL-ERBB3 | DIQMTQSPSSLSASVGDRVTITCQASQDITNYLNWYQQKP |
| | | (seq. 2) | GKAPKLLIYDASNLETGVPSRFSGSGSGTDFTFTISSLQP |
| | | | EDIATYNCQQCENFPITFGQGTRLEIKR |
| 76 | AB064VH | VH-EGFR | QVQLQESGPGLVKPSQTLSLTCTVSGYSISSDFAWNWIRQ |
| | | (seq. 3) | PPGKGLEWMGYISYSGNTRYQPSLKSRITISRDTSKNQFF |
| | | | LKLNSVTAADTATYYCVTAGRGFPYWGQGTLVTVSS |
| 77 | AB064VL | VL-EGFR | DIQMTQSPSSMSVSVGDRVTITCHSSQDINSNIGWLQQKP |
| | | (seq. 3) | GKSFKGLIYHGTNLDDGVPSRFSGSGSGTDYTLTISSLQP |
| | | | EDFATYYCVQYAQFPWTFGGGTKLEIKR |
| 78 | AB070VH | VH-VEGF | EVQLVESGGGLVQPGGSLRLSCAASGFTISDYWIHWVRQA |
| | | (seq. 2) | PGKGLEWVAGITPAGGYTYYADSVKGRFTISADTSKNTAY |
| | | | LQMNSLRAEDTAVYYCARFVFFLPYAMDYWGQGTLVTVSS |
| 79 | AB070VL | VL-VEGF | DIQMTQSPSSLSASVGDRVTITCRASQDVSTAVAWYQQKP |
| | | (seq. 2) | GKAPKLLIYSASFLYSGVPSRFSGSGSGTDFTLTISSLQP |
| | | | EDFATYYCQQSYTTPPTFGQGTKVEIKR |
| 80 | AB103VH | VH-VEGF | EVQLVESGGGLVQPGGSLRLSCAASGYDFTHYGMNWVRQA |
| | | (seq. 3) | PGKGLEWVGWINTYTGEPTYAADFKRRFTFSLDTSKSTAY |
| | | | LQMNSLRAEDTAVYYCAKYPYYYGTSHWYFDVWGQGTLVT |
| | | | VSS |
| 81 | AB103VL | VL-VEGF | DIQLTQSPSSLSASVGDRVTITCSASQDISNYLNWYQQKP |
| | | (seq. 3) | GKAPKVLIYFTSSLHSGVPSRFSGSGSGTDFTLTISSLQP |
| | | | EDFATYYCQQYSTVPWTFGQGTKVEIKR |
| 82 | AB116VH | VH-ERBB3 | EVQLLESGGGLVQPGGSLRLSCAASGFTFSHYVMAWVRQA |
| | | (seq. 3) | PGKGLEWVSSISSSGGWTLYADSVKGRFTISRDNSKNTLY |
| | | | LQMNSLRAEDTAVYYCTRGLKMATIFDYWGQGTLVTVSS |
| 83 | AB116VL | VL-ERBB3 | QSALTQPASVSGSPGQSITISCTGTSSDVGSYNVVSWYQQ |
| | | (seq. 3) | HPGKAPKLIIYEVSQRPSGVSNRFSGSKSGNTASLTISGL |
| | | | QTEDEADYYCCSYAGSSIFVIFGGGTKVTVLG |
| 84 | AB117VH | VH-VEGF | EVQLVESGGGLVQPGGSLRLSCAASGFTINASWIHWVRQA |
| | | (seq. 4) | PGKGLEWVGAIYPYSGYTNYADSVKGRFTISADTSKNTAY |
| | | | LQMNSLRAEDTAVYYCARWGHSTSPWAMDYWGQGTLVTVS |
| | | | S |
| 85 | AB117VL | VL-VEGF | DIQMTQSPSSLSASVGDRVTITCRASQVIRRSLAWYQQKP |
| | | (seq. 4) | GKAPKLLIYAASNLASGVPSRFSGSGSGTDFTLTISSLQP |
| | | | EDFATYYCQQSNTSPLTFGQGTKVEIKR |
| 86 | AB118VH | VH-NGF | EVQLVESGGGLVQPGGSLRLSCAASGFSLTNNNVNWVRQA |
| | | (seq. 2) | PGKGLEWVGGVWAGGATDYNSALKSRFTISRDNSKNTAYL |
| | | | QMNSLRAEDTAVYYCARDGGYSSSTLYAMDAWGQGTLVTV |
| | | | SS |
| 87 | AB118VL | VL-NGF | DIQMTQSPSSLSASVGDRVTITCRASEDIYNALAWYQQKP |
| | | (seq. 2) | GKAPKLLIYNTDTLHTGVPSRFSGSGSGTDYTLTISSLQP |
| | | | EDFATYFCQHYFHYPRTFGQGTKVEIKR |
| 88 | AB119VH | VH-MTX | DVQLQESGPGLVKPSQSLSLTCTVTGFSITSPYAWNWIRQ |
| | | | FPGNTLEWMGYISYRGSTTHHPSLKSRISITRDTSKNQFF |
| | | | LQLNSVTTEDTATYFCSSYGNYGAYSGQGTLVTVSA |
| 89 | AB119VL | VL-MTX | DVLLTQIPLSLPVSLGDQASISCRSSQSIVHSNGNTYLEW |
| | | | YLQKPGQSPKLLIYKVSTRFSGVPDRFSGSGSGTDFTLKI |
| | | | SRVEAEDLGVYYCFQGSHVPLTFGAGTQLELKR |
| 90 | AB121VH | VH-NKG2D | QVQLVESGGGLVKPGGSLRLSCAASGFTFSSYGMHWVRQA |
| | | | PGKGLEWVAFIRYDGSNKYYADSVKGRFTISRDNSKNTLY |
| | | | LQMNSLRAEDTAVYYCAKDRGLGDGTYFDYWGQGTTVTVS |
| | | | S |
| 91 | AB121VL | VL-NKG2D | QSALTQPASVSGSPGQSITISCSGSSSNIGNNAVNWYQQL |
| | | | PGKAPKLLIYYDDLLPSGVSDRFSGSKSGTSAFLAISGLQ |
| | | | SEDEADYYCAAWDDSLNGPVFGGGTKLTVLG |

[0211] Detailed description of specific DVD-Ig molecules capable of binding specific targets, and methods of making the same, is provided in the Examples section below.

### D. Production of DVD Proteins

[0212] The binding proteins provided herein may be produced by any of a number of techniques known in the art. For example, expression from host cells, wherein expression vector(s) encoding the DVD heavy and DVD light chains is (are) transfected into a host cell by standard techniques. The various forms of the term “transfection” are intended to encompass a wide variety of techniques commonly used for the introduction of exogenous DNA into a prokaryotic or eukaryotic host cell, e.g., electroporation, calcium-phosphate precipitation, DEAE-dextran transfection and the like. Although it is possible to express the DVD proteins provided herein in either prokaryotic or eukaryotic host cells, DVD proteins are expressed in eukaryotic cells, for example, mammalian host cells, because such eukaryotic cells (and in particular mammalian cells) are more likely than prokaryotic cells to assemble and secrete a properly folded and immunologically active DVD protein.

[0213] Exemplary mammalian host cells for expressing the recombinant antibodies provided herein include Chinese Hamster Ovary (CHO cells) (including dhfr-CHO cells, described in Urlaub and Chasin, (1980) Proc. Natl. Acad. Sci. USA 77:4216-4220, used with a DHFR selectable marker, e.g., as described in R. J. Kaufman and P. A. Sharp (1982) Mol. Biol. 159:601-621), NSO myeloma cells, COS cells, SP2 and PER.C6 cells. When recombinant expression vectors encoding DVD proteins are introduced into mammalian host cells, the DVD proteins are produced by culturing the host cells for a period of time sufficient to allow for expression of the DVD proteins in the host cells or secretion of the DVD proteins into the culture medium in which the host cells are grown. DVD proteins can be recovered from the culture medium using standard protein purification methods.

[0214] In an exemplary system for recombinant expression of DVD proteins provided herein, a recombinant expression vector encoding both the DVD heavy chain and the DVD light chain is introduced into dhfr-CHO cells by calcium phosphate-mediated transfection. Within the recombinant expression vector, the DVD heavy and light chain genes are each operatively linked to CMV enhancer/AdMLP promoter regulatory elements to drive high levels of transcription of the genes. The recombinant expression vector also carries a DHFR gene, which allows for selection of CHO cells that have been transfected with the vector using methotrexate selection/amplification. The selected transformant host cells are cultured to allow for expression of the DVD heavy and light chains and intact DVD protein is recovered from the culture medium. Standard molecular biology techniques are used to prepare the recombinant expression vector, transfect the host cells, select for transformants, culture the host cells and recover the DVD protein from the culture medium. A method of synthesizing a DVD protein provided herein by culturing a host cell provided herein in a suitable culture medium until a DVD protein is synthesized is also provided. The method can further comprise isolating the DVD protein from the culture medium.

[0215] An important feature of DVD-Ig is that it can be produced and purified in a similar way as a conventional antibody. The production of DVD-Ig results in a homogeneous, single major product with desired dual-specific activity, without any sequence modification of the constant region or chemical modifications of any kind. Other previously described methods to generate “bi-specific”, “multi-specific”, and “multi-specific multivalent” full length binding proteins do not lead to a single primary product but instead lead to the intracellular or secreted production of a mixture of assembled inactive, mono-specific, multi-specific, multivalent, full length binding proteins, and multivalent full length binding proteins with combination of different binding sites. As an example, based on the design described by Miller and Presta (PCT publication WO2001/077342(A1), there are 16 possible combinations of heavy and light chains. Consequently only 6.25% of protein is likely to be in the desired active form, and not as a single major product or single primary product compared to the other 15 possible combinations. Separation of the desired, fully active forms of the protein from inactive and partially active forms of the protein using standard chromatography techniques, typically used in large scale manufacturing, is yet to be demonstrated.

[0216] Surprisingly the design of the “dual-specific multivalent full length binding proteins” provided herein leads to a dual variable domain light chain and a dual variable domain heavy chain which assemble primarily to the desired “dual-specific multivalent full length binding proteins”.

[0217] At least 50%, at least 75% and at least 90% of the assembled, and expressed dual variable domain immunoglobulin molecules are the desired dual-specific tetravalent protein. This embodiment particularly enhances commercial utility. Therefore, a method to express a dual variable domain light chain and a dual variable domain heavy chain in a single cell leading to a single primary product of a “dual-specific tetravalent full length binding protein” is provided.

[0218] Methods of expressing a dual variable domain light chain and a dual variable domain heavy chain in a single cell leading to a “primary product” of a “dual-specific tetravalent full length binding protein”, where the “primary product” is more than 50% of all assembled protein, comprising a dual variable domain light chain and a dual variable domain heavy chain are provided.

[0219] Methods of expressing a dual variable domain light chain and a dual variable domain heavy chain in a single cell leading to a single “primary product” of a “dual-specific tetravalent full length binding protein”, where the “primary product” is more than 75% of all assembled protein, comprising a dual variable domain light chain and a dual variable domain heavy chain are provided.

[0220] Methods of expressing a dual variable domain light chain and a dual variable domain heavy chain in a single cell leading to a single “primary product” of a “dual-specific tetravalent full length binding protein”, where the “primary product” is more than 90% of all assembled protein, comprising a dual variable domain light chain and a dual variable domain heavy chain are provided.

### II. Derivatized DVD Binding Proteins

[0221] One embodiment provides a labeled binding protein wherein the binding protein is derivatized or linked to another functional molecule (e.g., another peptide or protein). For example, a labeled binding protein can be derived by functionally linking a binding protein provided herein (by chemical coupling, genetic fusion, noncovalent association or otherwise) to one or more other molecular entities, such as another antibody (e.g., a bispecific antibody or a diabody), a detectable agent, a cytotoxic agent, a pharmaceutical agent, and/or a protein or peptide that can mediate association of the binding protein with another molecule (such as a streptavidin core region or a polyhistidine tag).

[0222] Useful detectable agents with which a binding protein provided herein may be derivatized include fluorescent compounds. Exemplary fluorescent detectable agents include fluorescein, fluorescein isothiocyanate, rhodamine, 5-dimethylamine-1-napthalenesulfonyl chloride, phycoerythrin and the like. A binding protein may also be derivatized with detectable enzymes, such as alkaline phosphatase, horseradish peroxidase, glucose oxidase and the like. When a binding protein is derivatized with a detectable enzyme, it is detected by adding additional reagents that the enzyme uses to produce a detectable reaction product. For example, when the detectable agent horseradish peroxidase is present, the addition of hydrogen peroxide and diaminobenzidine leads to a colored reaction product, which is detectable. a binding protein may also be derivatized with biotin, and detected through indirect measurement of avidin or streptavidin binding.

[0223] Another embodiment provides a crystallized binding protein and formulations and compositions comprising such crystals. In one embodiment the crystallized binding protein has a greater half-life in vivo than the soluble counterpart of the binding protein. In another embodiment the binding protein retains biological activity after crystallization.

[0224] Crystallized binding proteins may be produced according to methods known in the art and as disclosed in WO 02072636, incorporated herein by reference.

[0225] Another embodiment provides a glycosylated binding protein wherein the antibody or antigen-binding portion thereof comprises one or more carbohydrate residues. Nascent in vivo protein production may undergo further processing, known as post-translational modification. In particular, sugar (glycosyl) residues may be added enzymatically, a process known as glycosylation. The resulting proteins bearing covalently linked oligosaccharide side chains are known as glycosylated proteins or glycoproteins. Antibodies are glycoproteins with one or more carbohydrate residues in the Fc domain, as well as the variable domain. Carbohydrate residues in the Fc domain have important effect on the effector function of the Fc domain, with minimal effect on antigen binding or half-life of the antibody (R. Jefferis, Biotechnol. Prog. 21 (2005), pp. 11-16). In contrast, glycosylation of the variable domain may have an effect on the antigen binding activity of the antibody. Glycosylation in the variable domain may have a negative effect on antibody binding affinity, likely due to steric hindrance (Co, M. S., et al., Mol. Immunol. (1993) 30:1361-1367), or result in increased affinity for the antigen (Wallick, S. C., et al., Exp. Med. (1988) 168:1099-1109; Wright, A., et al., EMBO J. (1991) 10:2717 2723).

[0226] One embodiment is directed to generating glycosylation site mutants in which the O- or N-linked glycosylation site of the binding protein has been mutated. One skilled in the art can generate such mutants using standard well-known technologies. Glycosylation site mutants that retain the biological activity but have increased or decreased binding activity are another embodiment.

[0227] In still another embodiment, the glycosylation of the antibody or antigen-binding portion provided herein is modified. For example, an aglycoslated antibody can be made (i.e., the antibody lacks glycosylation). Glycosylation can be altered to, for example, increase the affinity of the antibody for antigen. Such carbohydrate modifications can be accomplished by, for example, altering one or more sites of glycosylation within the antibody sequence. For example, one or more amino acid substitutions can be made that result in elimination of one or more variable region glycosylation sites to thereby eliminate glycosylation at that site. Such aglycosylation may increase the affinity of the antibody for antigen. Such an approach is described in further detail in PCT Publication WO2003016466A2, and U.S. Pat. Nos. 5,714,350 and 6,350,861, each of which is incorporated herein by reference in its entirety.

[0228] Additionally or alternatively, a modified binding protein can be made that has an altered type of glycosylation, such as a hypofucosylated antibody having reduced amounts of fucosyl residues (see Kanda, Yutaka et al., Journal of Biotechnology (2007), 130(3), 300-310.) or an antibody having increased bisecting GlcNAc structures. Such altered glycosylation patterns have been demonstrated to increase the ADCC ability of antibodies. Such carbohydrate modifications can be accomplished by, for example, expressing the antibody in a host cell with altered glycosylation machinery. Cells with altered glycosylation machinery have been described in the art and can be used as host cells in which to express recombinant antibodies to thereby produce an antibody with altered glycosylation. See, for example, Shields, R. L. et al. (2002) J. Biol. Chem. 277:26733-26740; Umana et al. (1999) Nat. Biotech. 17:176-1, as well as, European Patent No: EP 1,176,195; PCT Publications WO 03/035835; WO 99/54342 80, each of which is incorporated herein by reference in its entirety.

[0229] Protein glycosylation depends on the amino acid sequence of the protein of interest, as well as the host cell in which the protein is expressed. Different organisms may produce different glycosylation enzymes (eg., glycosyltransferases and glycosidases), and have different substrates (nucleotide sugars) available. Due to such factors, protein glycosylation pattern, and composition of glycosyl residues, may differ depending on the host system in which the particular protein is expressed. Suitable glycosyl residues may include, but are not limited to, glucose, galactose, mannose, fucose, n-acetylglucosamine and sialic acid. In an embodiment, the glycosylated binding protein comprises glycosyl residues such that the glycosylation pattern is human.

[0230] It is known to those skilled in the art that differing protein glycosylation may result in differing protein characteristics. For instance, the efficacy of a therapeutic protein produced in a microorganism host, such as yeast, and glycosylated utilizing the yeast endogenous pathway may be reduced compared to that of the same protein expressed in a mammalian cell, such as a CHO cell line. Such glycoproteins may also be immunogenic in humans and show reduced half-life in vivo after administration. Specific receptors in humans and other animals may recognize specific glycosyl residues and promote the rapid clearance of the protein from the bloodstream. Other adverse effects may include changes in protein folding, solubility, susceptibility to proteases, trafficking, transport, compartmentalization, secretion, recognition by other proteins or factors, antigenicity, or allergenicity. Accordingly, a practitioner may choose a therapeutic protein with a specific composition and pattern of glycosylation, for example glycosylation composition and pattern identical, or at least similar, to that produced in human cells or in the species-specific cells of the intended subject animal.

[0231] Expressing glycosylated proteins different from that of a host cell may be achieved by genetically modifying the host cell to express heterologous glycosylation enzymes. Using techniques known in the art a practitioner may generate antibodies or antigen-binding portions thereof exhibiting human protein glycosylation. For example, yeast strains have been genetically modified to express non-naturally occurring glycosylation enzymes such that glycosylated proteins (glycoproteins) produced in these yeast strains exhibit protein glycosylation identical to that of animal cells, especially human cells (U.S patent applications 20040018590 and 20020137134 and PCT publication WO2005100584 A2).

[0232] In addition to the binding proteins provided herein, anti-idiotypic (anti-Id) antibodies specific for the binding proteins are provided. An anti-Id antibody is an antibody, which recognizes unique determinants generally associated with the antigen-binding region of another antibody. The anti-Id can be prepared by immunizing an animal with the binding protein or a CDR containing region thereof. The immunized animal will recognize, and respond to the idiotypic determinants of the immunizing antibody and produce an anti-Id antibody. It is readily apparent that it may be easier to generate anti-idiotypic antibodies to the two or more parent antibodies incorporated into a DVD-Ig molecule; and confirm binding studies by methods well recognized in the art (e.g., BIAcore, ELISA) to verify that anti-idiotypic antibodies specific for the idiotype of each parent antibody also recognize the idiotype (e.g., antigen binding site) in the context of the DVD-Ig. The anti-idiotypic antibodies specific for each of the two or more antigen binding sites of a DVD-Ig provide ideal reagents to measure DVD-Ig concentrations of a human DVD-Ig in patient serum; DVD-Ig concentration assays can be established using a “sandwich assay ELISA format” with an antibody to a first antigen binding regions coated on the solid phase (e.g., BIAcore chip, ELISA plate etc.), rinsed with rinsing buffer, incubation with the serum sample, another rinsing step and ultimately incubation with another anti-idiotypic antibody to the another antigen binding site, itself labeled with an enzyme for quantitation of the binding reaction. In an embodiment, for a DVD-Ig with more than two different binding sites, anti-idiotypic antibodies to the two outermost binding sites (most distal and proximal from the constant region) will not only help in determining the DVD-Ig concentration in human serum but also document the integrity of the molecule in vivo. Each anti-Id antibody may also be used as an “immunogen” to induce an immune response in yet another animal, producing a so-called anti-anti-Id antibody.

[0233] Further, it will be appreciated by one skilled in the art that a protein of interest may be expressed using a library of host cells genetically engineered to express various glycosylation enzymes, such that member host cells of the library produce the protein of interest with variant glycosylation patterns. A practitioner may then select and isolate the protein of interest with particular novel glycosylation patterns. In an embodiment, the protein having a particularly selected novel glycosylation pattern exhibits improved or altered biological properties.

### III. Uses of DVD-Ig

[0234] Given their ability to bind to two or more antigens the binding proteins provided herein can be used to detect the antigens (e.g., in a biological sample, such as serum or plasma), using a conventional immunoassay, such as an enzyme linked immunosorbent assays (ELISA), an radioimmunoassay (RIA) or tissue immunohistochemistry. The DVD-Ig is directly or indirectly labeled with a detectable substance to facilitate detection of the bound or unbound antibody. Suitable detectable substances include various enzymes, prosthetic groups, fluorescent materials, luminescent materials and radioactive materials. Examples of suitable enzymes include horseradish peroxidase, alkaline phosphatase, β-galactosidase, or acetylcholinesterase; examples of suitable prosthetic group complexes include streptavidin/biotin and avidin/biotin; examples of suitable fluorescent materials include umbelliferone, fluorescein, fluorescein isothiocyanate, rhodamine, dichlorotriazinylamine fluorescein, dansyl chloride or phycoerythrin; an example of a luminescent material includes luminol; and examples of suitable radioactive material include ³H, ¹⁴C, ³⁵S, ⁹⁰Y, ⁹⁹Tc, ¹¹¹In, ¹²⁵I, ¹³¹I, ¹⁷⁷Lu, ¹⁶⁶Ho, or ¹⁵³Sm.

[0235] In an embodiment, the binding proteins provided herein are capable of neutralizing the activity of the antigens both in vitro and in vivo. Accordingly, such DVD-Igs can be used to inhibit antigen activity, e.g., in a cell culture containing the antigens, in human subjects or in other mammalian subjects having the antigens with which a binding protein provided herein cross-reacts. In another embodiment, a method for reducing antigen activity in a subject suffering from a disease or disorder in which the antigen activity is detrimental is provided. A binding protein provided herein can be administered to a human subject for therapeutic purposes.

[0236] As used herein, the term “a disorder in which antigen activity is detrimental” is intended to include diseases and other disorders in which the presence of the antigen in a subject suffering from the disorder has been shown to be or is suspected of being either responsible for the pathophysiology of the disorder or a factor that contributes to a worsening of the disorder. Accordingly, a disorder in which antigen activity is detrimental is a disorder in which reduction of antigen activity is expected to alleviate the symptoms and/or progression of the disorder. Such disorders may be evidenced, for example, by an increase in the concentration of the antigen in a biological fluid of a subject suffering from the disorder (e.g., an increase in the concentration of antigen in serum, plasma, synovial fluid, etc. of the subject). Non-limiting examples of disorders that can be treated with the binding proteins provided herein include those disorders discussed below and in the section pertaining to pharmaceutical compositions comprising the binding proteins.

[0237] The DVD-Igs provided herein may bind one antigen or multiple antigens. Such antigens include, but are not limited to, the targets listed in the following databases, which databases are incorporated herein by reference. These target databases include those listings:

Therapeutic targets (http://xin.cz3.nus.edu.sg/group/cjttd/ttd.asp);
Cytokines and cytokine receptors (http://www.cytokinewebfacts.com/, http://www.copewithcytokines.de/cope.cgi, and
http://cmbi.bjmu.edu.cn/cmbidata/cgf/CGF_Database/cytokine.medic.kumamoto-u.ac.jp/CFC/indexR.html);
Chemokines (http://cytokine.medic.kumamoto-u.ac.jp/CFC/CK/Chemokine.html);
Chemokine receptors and GPCRs (http://csp.medic.kumamoto-u.ac.jp/CSP/Receptor.html, http://www.gper.org/7tm/);
Olfactory Receptors (http://senselab.med.yale.edu/senselab/ORDB/default.asp);
Receptors (http://www.iuphar-db.org/iuphar-rd/list/index.htm);
Cancer targets (http://cged.hgc.jp/cgi-bin/input.cgi);
Secreted proteins as potential antibody targets (http://spd.cbi.pku.edu.cn/);
Protein kinases (http://spd.cbi.pku.edu.cn/), and
Human CD markers (http://contentlabvelocity.com/tools/6/1226/CD_table_final_locked.pdf) and (Zola H, 2005 CD molecules 2005: human cell differentiation molecules Blood, 106:3123-6).

[0238] DVD-Igs are useful as therapeutic agents to simultaneously block two different targets to enhance efficacy/safety and/or increase patient coverage. Such targets may include soluble targets (TNF) and cell surface receptor targets (VEGFR and EGFR). It can also be used to induce redirected cytotoxicity between tumor cells and T cells (Her2 and CD3) for cancer therapy, or between autoreactive cell and effector cells for autoimmune disease or transplantation, or between any target cell and effector cell to eliminate disease-causing cells in any given disease.

[0239] In addition, DVD-Ig can be used to trigger receptor clustering and activation when it is designed to target two different epitopes on the same receptor. This may have benefit in making agonistic and antagonistic anti-GPCR therapeutics. In this case, DVD-Ig can be used to target two different epitopes (including epitopes on both the loop regions and the extracellular domain) on one cell for clustering/signaling (two cell surface molecules) or signaling (on one molecule). Similarly, a DVD-Ig molecule can be designed to triger CTLA-4 ligation, and a negative signal by targeting two different epitopes (or 2 copies of the same epitope) of CTLA-4 extracellular domain, leading to down regulation of the immune response. CTLA-4 is a clinically validated target for therapeutic treatment of a number of immunological disorders. CTLA-4/B7 interactions negatively regulate T cell activation by attenuating cell cycle progression, IL-2 production, and proliferation of T cells following activation, and CTLA-4 (CD152) engagement can down-regulate T cell activation and promote the induction of immune tolerance. However, the strategy of attenuating T cell activation by agonistic antibody engagement of CTLA-4 has been unsuccessful since CTLA-4 activation requires ligation. The molecular interaction of CTLA-4/B7 is in “skewed zipper” arrays, as demonstrated by crystal structural analysis (Stamper 2001 Nature 410:608). However none of the currently available CTLA-4 binding reagents have ligation properties, including anti-CTLA-4 mAbs. There have been several attempts to address this issue. In one case, a cell member-bound single chain antibody was generated, and significantly inhibited allogeneic rejection in mice (Hwang 2002 JI 169:633). In a separate case, artificial APC surface-linked single-chain antibody to CTLA-4 was generated and demonstrated to attenuate T cell responses (Griffin 2000 JI 164:4433). In both cases, CTLA-4 ligation was achieved by closely localized member-bound antibodies in artificial systems. While these experiments provide proof-of-concept for immune down-regulation by triggering CTLA-4 negative signaling, the reagents used in these reports are not suitable for therapeutic use. To this end, CTLA-4 ligation may be achieved by using a DVD-Ig molecule, which target two different epitopes (or 2 copies of the same epitope) of CTLA-4 extracellular domain. The rationale is that the distance spanning two binding sites of an IgG, approximately 150-170 Å, is too large for active ligation of CTLA-4 (30-50 Å between 2 CTLA-4 homodimer). However the distance between the two binding sites on DVD-Ig (one arm) is much shorter, also in the range of 30-50 Å, allowing proper ligation of CTLA-4.

[0240] Similarly, DVD-Ig can target two different members of a cell surface receptor complex (e.g., IL-12R alpha and beta). Furthermore, DVD-Ig can target CR1 and a soluble protein/pathogen to drive rapid clearance of the target soluble protein/pathogen.

[0241] Additionally, DVD-Igs provided herein can be employed for tissue-specific delivery (target a tissue marker and a disease mediator for enhanced local PK thus higher efficacy and/or lower toxicity), including intracellular delivery (targeting an internalizing receptor and a intracellular molecule), delivering to inside brain (targeting transferrin receptor and a CNS disease mediator for crossing the blood-brain barrier). DVD-Ig can also serve as a carrier protein to deliver an antigen to a specific location via binding to a non-neutralizing epitope of that antigen and also to increase the half-life of the antigen. Furthermore, DVD-Ig can be designed to either be physically linked to medical devices implanted into patients or target these medical devices (see Burke, Sandra E.; Kuntz, Richard E.; Schwartz, Lewis B., Zotarolimus eluting stents. Advanced Drug Delivery Reviews (2006), 58(3), 437-446; Surface coatings for biological activation and functionalization of medical devices, Hildebrand, H. F.; Blanchemain, N.; Mayer, G.; Chai, F.; Lefebvre, M.; Boschin, F., Surface and Coatings Technology (2006), 200(22-23), 6318-6324; Drug/device combinations for local drug therapies and infection prophylaxis, Wu, Peng; Grainger, David W., Biomaterials (2006), 27(11), 2450-2467; Mediation of the cytokine network in the implantation of orthopedic devices., Marques, A. P.; Hunt, J. A.; Reis, Rui L., Biodegradable Systems in Tissue Engineering and Regenerative Medicine (2005), 377-397). Briefly, directing appropriate types of cell to the site of medical implant may promote healing and restoring normal tissue function. Alternatively, inhibition of mediators (including but not limited to cytokines), released upon device implantation by a DVD coupled to or target to a device is also provided. For example, Stents have been used for years in interventional cardiology to clear blocked arteries and to improve the flow of blood to the heart muscle. However, traditional bare metal stents have been known to cause restenosis (re-narrowing of the artery in a treated area) in some patients and can lead to blood clots. Recently, an anti-CD34 antibody coated stent has been described which reduced restenosis and prevents blood clots from occurring by capturing endothelial progenitor cells (EPC) circulating throughout the blood. Endothelial cells are cells that line blood vessels, allowing blood to flow smoothly. The EPCs adhere to the hard surface of the stent forming a smooth layer that not only promotes healing but prevents restenosis and blood clots, complications previously associated with the use of stents (Aoji et al. 2005 J Am Coll Cardiol. 45(10):1574-9). In addition to improving outcomes for patients requiring stents, there are also implications for patients requiring cardiovascular bypass surgery. For example, a prosthetic vascular conduit (artificial artery) coated with anti-EPC antibodies would eliminate the need to use arteries from patients legs or arms for bypass surgery grafts. This would reduce surgery and anesthesia times, which in turn will reduce coronary surgery deaths. DVD-Ig are designed in such a way that it binds to a cell surface marker (such as CD34) as well as a protein (or an epitope of any kind, including but not limited to proteins, lipids and polysaccharides) that has been coated on the implanted device to facilitate the cell recruitment. Such approaches can also be applied to other medical implants in general. Alternatively, DVD-Igs can be coated on medical devices and upon implantation and releasing all DVDs from the device (or any other need which may require additional fresh DVD-Ig, including aging and denaturation of the already loaded DVD-Ig) the device could be reloaded by systemic administration of fresh DVD-Ig to the patient, where the DVD-Ig is designed to binds to a target of interest (a cytokine, a cell surface marker (such as CD34) etc.) with one set of binding sites and to a target coated on the device (including a protein, an epitope of any kind, including but not limited to lipids, polysaccharides and polymers) with the other. This technology has the advantage of extending the usefulness of coated implants.

### A. Use of DVD-Igs in Various Diseases

[0242] DVD-Ig molecules provided herein are also useful as therapeutic molecules to treat various diseases. Such DVD molecules may bind one or more targets involved in a specific disease. Examples of such targets in various diseases are described below.

### 1. Human Autoimmune and Inflammatory Response

[0243] Many proteins have been implicated in general autoimmune and inflammatory responses, including C5, CCL1 (1-309), CCL11 (eotaxin), CCL13 (mcp-4), CCL15 (MIP-1d), CCL16 (HCC-4), CCL17 (TARC), CCL18 (PARC), CCL19, CCL2 (mcp-1), CCL20 (MIP-3a), CCL21 (MIP-2), CCL23 (MPIF-1), CCL24 (MPIF-2/eotaxin-2), CCL25 (TECK), CCL26, CCL3 (MIP-1α), CCL4 (MIP-1b), CCLS (RANTES), CCL7 (mcp-3), CCL8 (mcp-2), CXCL1, CXCL10 (IP-10), CXCL11 (1-TAC/IP-9), CXCL12 (SDF1), CXCL13, CXCL14, CXCL2, CXCL3, CXCL5 (ENA-78/LIX), CXCL6 (GCP-2), CXCL9, 11.13, IL8, CCL13 (mcp-4), CCR1, CCR2, CCR3, CCR4, CCR5, CCR6, CCR7, CCR8, CCR9, CX3CR1, IL8RA, XCR1 (CCXCR1), IFNα2, IL10, IL13, IL17C, IL1A, IL1B, IL1F10, IL1F5, IL1F6, IL1F7, IL1F8, IL1F9, IL22, IL5, IL8, IL9, LTA, LTB, MIF, SCYE1 (endothelial Monocyte-activating cytokine), SPP1, TNF, TNFSF5, IFNA2, IL10RA, IL10RB, IL13, IL13RA1, IL5RA, IL9, IL9R, ABCF1, BCL6, C3, C4A, CEBPB, CRP, ICEBERG, IL1R1, IL1RN, IL8RB, LTB4R, TOLLIP, FADD, IRAK1, WAK2, MYD88, NCK2, TNFAIP3, TRADD, TRAF1, TRAF2, TRAF3, TRAF4, TRAF5, TRAF6, ACVR1, ACVR1B, ACVR2, ACVR2B, ACVRL1, CD28, CD3E, CD3G, CD3Z, CD69, CD80, CD86, CNR1, CTLA4, CYSLTR1, FCER1A, FCER2, FCGR3A, GPR44, HAVCR2, OPRD1, P2RX7, TLR2, TLR3, TLR4, TLR5, TLR6, TLR7, TLR8, TLR9, TLR10, BLR1, CCL1, CCL2, CCL3, CCL4, CCL5, CCL7, CCL8, CCL11, CCL13, CCL15, CCL16, CCL17, CCL18, CCL19, CCL20, CCL21, CCL22, CCL23, CCL24, CCL25, CCR1, CCR2, CCR3, CCR4, CCR5, CCR6, CCR7, CCR8, CCR9, CX3CL1, CX3CR1, CXCL1, CXCL2, CXCL3, CXCL5, CXCL6, CXCL10, CXCL11, CXCL12, CXCL13, CXCR4, GPR2, SCYE1, SDF2, XCL1, XCL2, XCR1, AMH, AMHR2, BMPR1A, BMPR1B, BMPR2, C19orf10 (IL27w), CER1, CSF1, CSF2, CSF3, DKFZp451J0118, FGF2, GFI1, IFNα1, IFNB1, IFNG, IGF1, IL1A, IL1B, IL1R1, IL1R2, IL2, IL2RA, IL2RB, IL2RG, IL3, HA, IL4R, IL5, IL5RA, IL6, IL6R, IL6ST, IL7, IL8, IL8RA, IL8RB, IL9, IL9R, IL10, IL10RA, IL10RB, IL11, IL11RA, IL12A, IL12B, IL12RB1, IL12RB2, IL13, IL13RA1, IL13RA2, IL15, IL15RA, IL16, IL17, IL17R, IL18, IL18R1, IL19, IL20, KITLG, LEP, LTA, LTB, LTB4R, LTB4R2, LTBR, MIF, NPPB, PDGFB, TBX21, TDGF1, TGFA, TGFB1, TGFB111, TGFB2, TGFB3, TGFBI, TGFBR1, TGFBR2, TGFBR3, TH1L, TNF, TNFRSF1A, TNFRSF1B, TNFRSF7, TNFRSF8, TNFRSF9, TNFRSF11A, TNFRSF21, TNFSF4, TNFSF5, TNFSF6, TNFSF11, VEGF, ZFPM2, and RNF110 (ZNF144). In one aspect, DVD-Igs capable of binding one or more of the targets listed herein are provided.

### 2. Asthma

[0244] Allergic asthma is characterized by the presence of eosinophilia, goblet cell metaplasia, epithelial cell alterations, airway hyperreactivity (AHR), and Th2 and Th1 cytokine expression, as well as elevated serum IgE levels. It is now widely accepted that airway inflammation is the key factor underlying the pathogenesis of asthma, involving a complex interplay of inflammatory cells such as T cells, B cells, eosinophils, mast cells and macrophages, and of their secreted mediators including cytokines and chemokines. Corticosteroids are the most important anti-inflammatory treatment for asthma today, however their mechanism of action is non-specific and safety concerns exist, especially in the juvenile patient population. The development of more specific and targeted therapies is therefore warranted. There is increasing evidence that IL-13 in mice mimics many of the features of asthma, including AHR, mucus hypersecretion and airway fibrosis, independently of eosinophilic inflammation (Finotto et al., International Immunology (2005), 17(8), 993-1007; Padilla et al., Journal of Immunology (2005), 174(12), 8097-8105).

[0245] IL-13 has been implicated as having a pivotal role in causing pathological responses associated with asthma. The development of anti-IL-13 mAb therapy to reduce the effects of IL-13 in the lung is an exciting new approach that offers considerable promise as a novel treatment for asthma. However other mediators of differential immunological pathways are also involved in asthma pathogenesis, and blocking these mediators, in addition to IL-13, may offer additional therapeutic benefit. Such target pairs include, but are not limited to, IL-13 and a pro-inflammatory cytokine, such as tumor necrosis factor-α (TNF-α). TNF-α may amplify the inflammatory response in asthma and may be linked to disease severity (McDonnell, et al., Progress in Respiratory Research (2001), 31(New Drugs for Asthma, Allergy and COPD), 247-250.). This suggests that blocking both IL-13 and TNF-a may have beneficial effects, particularly in severe airway disease. In another embodiment the DVD-Ig provided herein binds the targets IL-13 and TNFα and is used for treating asthma.

[0246] Animal models such as OVA-induced asthma mouse model, where both inflammation and AHR can be assessed, are known in the art and may be used to determine the ability of various DVD-Ig molecules to treat asthma. Animal models for studying asthma are disclosed in Coffman, et al., Journal of Experimental Medicine (2005), 201(12), 1875-1879; Lloyd, et al., Advances in Immunology (2001), 77, 263-295; Boyce et al., Journal of Experimental Medicine (2005), 201(12), 1869-1873; and Snibson, et al., Journal of the British Society for Allergy and Clinical Immunology (2005), 35(2), 146-52. In addition to routine safety assessments of these target pairs specific tests for the degree of immunosuppression may be warranted and helpful in selecting the best target pairs (see Luster et al., Toxicology (1994), 92(1-3), 229-43; Descotes, et al., Developments in biological standardization (1992), 77 99-102; Hart et al., Journal of Allergy and Clinical Immunology (2001), 108(2), 250-257).

[0247] Based on the rationale disclosed herein and using the same evaluation model for efficacy and safety other pairs of targets that DVD-Ig molecules can bind and be useful to treat asthma may be determined. In an embodiment, such targets include, but are not limited to, IL-13 and IL-1beta, since IL-1beta is also implicated in inflammatory response in asthma; IL-13 and cytokines and chemokines that are involved in inflammation, such as IL-13 and IL-9; IL-13 and IL-4; IL-13 and IL-5; IL-13 and IL-25; IL-13 and TARC; IL-13 and MDC; IL-13 and MIF; IL-13 and TGF-β; IL-13 and LHR agonist; IL-13 and CL25; IL-13 and SPRR2a; IL-13 and SPRR2b; and IL-13 and ADAMS. DVD-Igs capable of binding one or more targets involved in asthma such as, for example CSF1 (MCSF), CSF2 (GM-CSF), CSF3 (GCSF), FGF2, IFNα1, IFNB1, IFNG, histamine and histamine receptors, IL1A, IL1B, IL2, IL3, IL4, IL5, IL6, IL7, IL8, IL9, IL10, IL11, IL12A, IL12B, 1113, IL14, IL15, IL16, IL17, IL18, IL19, KITLG, PDGFB, IL2RA, IL4R, IL5RA, IL8RA, IL8RB, IL12RB1, IL12RB2, IL13RA1, IL13RA2, IL18R1, TSLP, CCL1, CCL2, CCL3, CCL4, CCL5, CCL7, CCL8, CCL13, CCL17, CCL18, CCL19, CCL20, CCL22, CCL24,CX3CL1, CXCL1, CXCL2, CXCL3, XCL1, CCR2, CCR3, CCR4, CCR5, CCR6, CCR7, CCR8, CX3CR1, GPR2, XCR1, FOS, GATA3, JAK1, JAK3, STAT6, TBX21, TGFB1, TNF, TNFSF6, YY1, CYSLTR1, FCER1A, FCER2, LTB4R, TB4R2, LTBR, or Chitinase are also provided.

### 3. Rheumatoid Arthritis

[0248] Rheumatoid arthritis (RA), a systemic disease, is characterized by a chronic inflammatory reaction in the synovium of joints and is associated with degeneration of cartilage and erosion of juxta-articular bone. Many pro-inflammatory cytokines including TNF, chemokines, and growth factors are expressed in diseased joints. Systemic administration of anti-TNF antibody or sTNFR fusion protein to mouse models of RA was shown to be anti-inflammatory and joint protective. Clinical investigations in which the activcity of TNF in RA patients was blocked with intravenously administered infliximab (Harriman G, Harper L K, Schaible T F. 1999 Summary of clinical trials in rheumatoid arthritis using infliximab, an anti-TNFalpha treatment. Ann Rheum Dis 58 Suppl 1:161-4), a chimeric anti-TNF mAb, has provided evidence that TNF regulates IL-6, IL-8, MCP-1, and VEGF production, recruitment of immune and inflammatory cells into joints, angiogenesis, and reduction of blood levels of matrix metalloproteinases-1 and -3. A better understanding of the inflammatory pathway in rheumatoid arthritis has led to identification of other therapeutic targets involved in rheumatoid arthritis. Promising treatments such as interleukin-6 antagonists (IL-6 receptor antibody MRA, developed by Chugai, Roche (see Nishimoto, Norihiro et al., Arthritis & Rheumatism (2004), 50(6), 1761-1769), CTLA4Ig (abatacept, Genovese Mc et al 2005 Abatacept for rheumatoid arthritis refractory to tumor necrosis factor alpha inhibition. N Engl J. Med. 353:1114-23.), and anti-B cell therapy (rituximab, Okamoto H, Kamatani N. 2004 Rituximab for rheumatoid arthritis. N Engl J. Med. 351:1909) have already been tested in randomized controlled trials over the past year. Other cytokines have been identified and have been shown to be of benefit in animal models, including interleukin-15 (therapeutic antibody HuMax-IL_{—}15, AMG 714 see Baslund, Bo et al., Arthritis & Rheumatism (2005), 52(9), 2686-2692), interleukin-17, and interleukin-18, and clinical trials of these agents are currently under way. Dual-specific antibody therapy, combining anti-TNF and another mediator, has great potential in enhancing clinical efficacy and/or patient coverage. For example, blocking both TNF and VEGF can potentially eradicate inflammation and angiogenesis, both of which are involved in pathophysiology of RA. Blocking other pairs of targets involved in RA including, but not limited to, TNF and IL-18; TNF and IL-12; TNF and IL-23; TNF and IL-TNF and MIF; TNF and IL-17; and TNF and IL-15 with specific DVD Igs is also contemplated. In addition to routine safety assessments of these target pairs, specific tests for the degree of immunosuppression may be warranted and helpful in selecting the best target pairs (see Luster et al., Toxicology (1994), 92(1-3), 229-43; Descotes, et al., Developments in biological standardization (1992), 77 99-102; Hart et al., Journal of Allergy and Clinical Immunology (2001), 108(2), 250-257). Whether a DVD Ig molecule will be useful for the treatment of rheumatoid arthritis can be assessed using pre-clinical animal RA models such as the collagen-induced arthritis mouse model. Other useful models are also well known in the art (see Brand D D., Comp Med. (2005) 55(2):114-22). Based on the cross-reactivity of the parental antibodies for human and mouse othologues (e.g., reactivity for human and mouse TNF, human and mouse IL-15 etc.) validation studies in the mouse CIA model may be conducted with “matched surrogate antibody” derived DVD-Ig molecules; briefly, a DVD-Ig based on two (or more) mouse target specific antibodies may be matched to the extent possible to the characteristics of the parental human or humanized antibodies used for human DVD-Ig construction (similar affinity, similar neutralization potency, similar half-life etc.).

### 4. SLE

[0249] The immunopathogenic hallmark of SLE is the polyclonal B cell activation, which leads to hyperglobulinemia, autoantibody production and immune complex formation. The fundamental abnormality appears to be the failure of T cells to suppress the forbidden B cell clones due to generalized T cell dysregulation. In addition, B and T-cell interaction is facilitated by several cytokines such as IL-10 as well as co-stimulatory molecules such as CD40 and CD40L, B7 and CD28 and CTLA-4, which initiate the second signal. These interactions together with impaired phagocytic clearance of immune complexes and apoptotic material, perpetuate the immune response with resultant tissue injury. The following targets may be involved in SLE and can potentially be used for DVD-Ig approach for therapeutic intervention: B cell targeted therapies: CD-20, CD-22, CD-19, CD28, CD4, CD80, HLA-DRA, IL10, IL2, IL4, TNFRSF5, TNFRSF6, TNFSF5, TNFSF6, BLR1, HDAC4, HDAC5, HDAC7A, HDAC9, ICOSL, IGBP1, MS4A1, RGS1, SLA2, CD81, IFNB1, IL10, TNFRSF5, TNFRSF7, TNFSF5, AICDA, BLNK, GALNAC4S-6ST, HDAC4, HDAC5, HDAC7A, HDAC9, IL10, IL11, IL4, INHA, INHBA, KLF6, TNFRSF7, CD28, CD38, CD69, CD80, CD83, CD86, DPP4, FCER2, IL2RA, TNFRSF8, TNFSF7, CD24, CD37, CD40, CD72, CD74, CD79A, CD79B, CR2, IL1R2, ITGA2, ITGA3, MS4A1, ST6GAL1, CD1C, CHST10, HLA-A, HLA-DRA, and NT5E.; co-stimulatory signals: CTLA4 or B7.1/B7.2; inhibition of B cell survival: BlyS, BAFF; Complement inactivation: C5; Cytokine modulation: the key principle is that the net biologic response in any tissue is the result of a balance between local levels of proinflammatory or anti-inflammatory cytokines (see Sfikakis P P et al 2005 Curr Opin Rheumatol 17:550-7). SLE is considered to be a Th-2 driven disease with documented elevations in serum IL-4, IL-6, IL-10. DVD Igs capable of binding one or more targets such as, for example IL-4, IL-6, IL-10, IFN-α, or TNF-α are also contemplated. Combination of targets discussed herein will enhance therapeutic efficacy for SLE which can be tested in a number of lupus preclinical models (see Peng S L (2004) Methods Mol. Med.; 102:227-72). Based on the cross-reactivity of the parental antibodies for human and mouse othologues (e.g., reactivity for human and mouse CD20, human and mouse Interferon alpha etc.) validation studies in a mouse lupus model may be conducted with “matched surrogate antibody” derived DVD-Ig molecules; briefly, a DVD-Ig based two (or more) mouse target specific antibodies may be matched to the extent possible to the characteristics of the parental human or humanized antibodies used for human DVD-Ig construction (similar affinity, similar neutralization potency, similar half-life etc.).

### 5. Multiple Sclerosis

[0250] Multiple sclerosis (MS) is a complex human autoimmune-type disease with a predominantly unknown etiology. Immunologic destruction of myelin basic protein (MBP) throughout the nervous system is the major pathology of multiple sclerosis. MS is a disease of complex pathologies, which involves infiltration by CD4+ and CD8+T cells and of response within the central nervous system. Expression in the CNS of cytokines, reactive nitrogen species and costimulator molecules have all been described in MS. Of major consideration are immunological mechanisms that contribute to the development of autoimmunity In particular, antigen expression, cytokine and leukocyte interactions, and regulatory T-cells, which help balance/modulate other T-cells such as Th1 and Th2 cells, are important areas for therapeutic target identification.

[0251] IL-12 is a proinflammatory cytokine that is produced by APC and promotes differentiation of Th1 effector cells. IL-12 is produced in the developing lesions of patients with MS as well as in EAE-affected animals. Previously it was shown that interference in IL-12 pathways effectively prevents EAE in rodents, and that in vivo neutralization of IL-12p40 using a anti-IL-12 mAb has beneficial effects in the myelin-induced EAE model in common marmosets.

[0252] TWEAK is a member of the TNF family, constitutively expressed in the central nervous system (CNS), with pro-inflammatory, proliferative or apoptotic effects depending upon cell types. Its receptor, Fn14, is expressed in CNS by endothelial cells, reactive astrocytes and neurons. TWEAK and Fn14 mRNA expression increased in spinal cord during experimental autoimmune encephalomyelitis (EAE). Anti-TWEAK antibody treatment in myelin oligodendrocyte glycoprotein (MOG) induced EAE in C57BL/6 mice resulted in a reduction of disease severity and leukocyte infiltration when mice were treated after the priming phase.

[0253] In one embodiment DVD Ig molecules capable of binding one or more, for example two, targets such as, for example IL-12, TWEAK, IL-23, CXCL13, CD40, CD40L, IL-18, VEGF, VLA-4, TNF, CD45RB, CD200, IFNgamma, GM-CSF, FGF, C5, CD52, or CCR2 are provided. An embodiment includes a dual-specific anti-IL-12/TWEAK DVD Ig as a therapeutic agent beneficial for the treatment of MS.

[0254] Several animal models for assessing the usefulness of the DVD molecules to treat MS are known in the art (see Steinman L, et al., (2005) Trends Immunol 26(11):565-71; Lublin FD., et al., (1985) Springer Semin Immunopathol. 8(3):197-208; Genain C P, et al., (1997) J Mol. Med. 75(3):187-97; Tuohy V K, et al., (1999) J Exp Med. 189(7):1033-42; Owens T, et al., (1995) Neurol Clin. 13(1):51-73; and 't Hart B A, et al., (2005) J Immunol 175(7):4761-8. Based on the cross-reactivity of the parental antibodies for human and animal species othologues (e.g., reactivity for human and mouse IL-12, human and mouse TWEAK etc.) validation studies in the mouse EAE model may be conducted with “matched surrogate antibody” derived DVD-Ig molecules; briefly, a DVD-Ig based on to (or more) mouse target specific antibodies may be matched to the extent possible to the characteristics of the parental human or humanized antibodies used for human DVD-Ig construction (similar affinity, similar neutralization potency, similar half-life etc.). The same concept applies to animal models in other non-rodent species, where a “matched surrogate antibody” derived DVD-Ig would be selected for the anticipated pharmacology and possibly safety studies. In addition to routine safety assessments of these target pairs specific tests for the degree of immunosuppression may be warranted and helpful in selecting the best target pairs (see Luster et al., Toxicology (1994), 92(1-3), 229-43; Descotes, et al., Developments in biological standardization (1992), 77 99-102; Jones R. 2000 Rovelizumab (ICOS Corp). IDrugs. 3(4):442-6).

[0255] MS is however not only an immunologic disease but has a very important neurodegenerative component. Disease progression in MS is due to cumulative loss and damage of axons and the final disease scores of the patients are determined by these neurodegenerative processes (Compston A. & Coles A. (2008) Lancet 372: 1502-1517; Trapp B D. & Nave K A. (2008) Annu. Rev. Neuroscience 31: 247-269). Several mechanisms might account for axonal damage in MS. Excessive release of the neurotransmitter glutamate with associated calcium-mediated neurotoxicity, nitric-oxide release and subsequent axon damage, loss of neurotrophic support, massive accumulation of repulsive or axon growth inhibitory molecules like RGM A, NOGO A, Semaphorins, Ephrins, may contribute to axon-directed neurodegeneration and loss of successful axon regeneration. Targeting in a single DVD Ig molecule neutralizing activities directed against components like RGM A, NOGO A, Semaphorins, Ephrins with neutralizing activities directed against pro-inflammatory cytokines like IL-12, TWEAK, IL-23, CXCL13, CD40, CD40L, IL-18, VEGF, VLA-4, TNF, CD45RB, CD200, IFNgamma, GM-CSF, FGF, C5, CD52, and CCR2 would enable the simultaneous focus on inflammation and neuroregeneration, a goal not yet achieved by any of the current therapeutic MS principles. Stimulating neuroregeneration can compensate the functional impairments caused by the massive axonal neurodegeneration observed in MS, making recovery of lost cerebral functions possible.

### 6. Sepsis

[0256] The pathophysiology of sepsis is initiated by the outer membrane components of both gram-negative organisms (lipopolysaccharide [LPS], lipid A, endotoxin) and gram-positive organisms (lipoteichoic acid, peptidoglycan). These outer membrane components are able to bind to the CD14 receptor on the surface of monocytes. By virtue of the recently described toll-like receptors, a signal is then transmitted to the cell, leading to the eventual production of the proinflammatory cytokines tumor necrosis factor-alpha (TNF-alpha) and interleukin-1 (IL-1). Overwhelming inflammatory and immune responses are essential features of septic shock and play a central part in the pathogenesis of tissue damage, multiple organ failure, and death induced by sepsis. Cytokines, especially tumor necrosis factor (TNF) and interleukin (IL-1), have been shown to be critical mediators of septic shock. These cytokines have a direct toxic effect on tissues; they also activate phospholipase A2. These and other effects lead to increased concentrations of platelet-activating factor, promotion of nitric oxide synthase activity, promotion of tissue infiltration by neutrophils, and promotion of neutrophil activity.

[0257] The treatment of sepsis and septic shock remains a clinical conundrum, and recent prospective trials with biological response modifiers (i.e. anti-TNF, anti-MIF) aimed at the inflammatory response have shown only modest clinical benefit. Recently, interest has shifted toward therapies aimed at reversing the accompanying periods of immune suppression. Studies in experimental animals and critically ill patients have demonstrated that increased apoptosis of lymphoid organs and some parenchymal tissues contribute to this immune suppression, anergy, and organ system dysfunction. During sepsis syndromes, lymphocyte apoptosis can be triggered by the absence of IL-2 or by the release of glucocorticoids, granzymes, or the so-called ‘death’ cytokines: tumor necrosis factor alpha or Fas ligand. Apoptosis proceeds via auto-activation of cytosolic and/or mitochondrial caspases, which can be influenced by the pro- and anti-apoptotic members of the Bcl-2 family. In experimental animals, not only can treatment with inhibitors of apoptosis prevent lymphoid cell apoptosis; it may also improve outcome. Although clinical trials with anti-apoptotic agents remain distant due in large part to technical difficulties associated with their administration and tissue targeting, inhibition of lymphocyte apoptosis represents an attractive therapeutic target for the septic patient. Likewise, a dual-specific agent targeting both inflammatory mediator and a apoptotic mediator, may have added benefit. One embodiment pertains to DVD Igs capable of binding one or more targets involved in sepsis, in an embodiment two targets, such as, for example TNF, IL-1, MIF, IL-6, IL-8, IL-18, IL-12, IL-23, FasL, LPS, Toll-like receptors, TLR-4, tissue factor, MIP-2, ADORA2A, CASP1, CASP4, IL-10, IL-1B, NFKB1, PROC, TNFRSF1A, CSF3, CCR3, IL1RN, MIF, NFKB1, PTAFR, TLR2, TLR4, GPR44, HMOX1, midkine, IRAK1, NFKB2, SERPINA1, SERPINE1, or TREM1. The efficacy of such DVD Igs for sepsis can be assessed in preclinical animal models known in the art (see Buras J A, et al., (2005) Nat Rev Drug Discov. 4(10):854-65 and Calandra T, et al., (2000) Nat. Med. 6(2):164-70).

### 7. Neurological Disorders

### 7.1. Neurodegenerative Diseases

[0258] Neurodegenerative diseases are either chronic in which case they are usually age-dependent or acute (e.g., stroke, traumatic brain injury, spinal cord injury, etc.). They are characterized by progressive loss of neuronal functions (neuronal cell death, axon loss, neuritic dystrophy, demyelination), loss of mobility and loss of memory. Emerging knowledge of the mechanisms underlying chronic neurodegenerative diseases (e.g., Alzheimer's disease) show a complex etiology and a variety of factors have been recognized to contribute to their development and progression e.g., age, glycemic status, amyloid production and multimerization, accumulation of advanced glycation-end products (AGE) which bind to their receptor RAGE (receptor for AGE), increased brain oxidative stress, decreased cerebral blood flow, neuroinflammation including release of inflammatory cytokines and chemokines, neuronal dysfunction and microglial activation. Thus these chronic neurodegenerative diseases represent a complex interaction between multiple cell types and mediators. Treatment strategies for such diseases are limited and mostly constitute either blocking inflammatory processes with non-specific anti-inflammatory agents (e.g., corticosteroids, COX inhibitors) or agents to prevent neuron loss and/or synaptic functions. These treatments fail to stop disease progression. Recent studies suggest that more targeted therapies such as antibodies to soluble A-b peptide (including the A-b oligomeric forms) can not only help stop disease progression but may help maintain memory and other cognitive functions as well. These preliminary observations suggest that specific therapies targeting more than one disease mediator (e.g., A-b and a pro-inflammatory cytokine such as TNF) may provide even better therapeutic efficacy for chronic neurodegenerative diseases than observed with targeting a single disease mechanism (e.g., soluble A-b□alone) (see C. E. Shepherd, et al, Neurobiol Aging. 2005 Oct. 24; Nelson R B., Curr Pharm Des. 2005; 11:3335; William L. Klein.; Neurochem Int. 2002; 41:345; Michelle C Janelsins, et al., Neuroinflammation. 2005; 2:23; Soloman B., Curr Alzheimer Res. 2004; 1:149; Igor Klyubin, et al., Nat. Med. 2005; 11:556-61; Arancio O, et al., EMBO Journal (2004) 1-10; Bornemann K D, et al., Am J Pathol. 2001; 158:63; Deane R, et al., Nat. Med. 2003; 9:907-13; and Eliezer Masliah, et al., Neuron. 2005; 46:857).

[0259] The DVD-Ig molecules provided herein can bind one or more targets involved in Chronic neurodegenerative diseases such as Alzheimers. Such targets include, but are not limited to, any mediator, soluble or cell surface, implicated in AD pathogenesis e.g AGE (S100 A, amphoterin), pro-inflammatory cytokines (e.g., IL-1), chemokines (e.g., MCP 1), molecules that inhibit nerve regeneration (e.g., Nogo, RGM A), molecules that enhance neurite growth (neurotrophins) and molecules that can mediate transport at the blood brain barrier (e.g., transferrin receptor, insulin receptor or RAGE). The efficacy of DVD-Ig molecules can be validated in pre-clinical animal models such as the transgenic mice that over-express amyloid precursor protein or RAGE and develop Alzheimer's disease-like symptoms. In addition, DVD-Ig molecules can be constructed and tested for efficacy in the animal models and the best therapeutic DVD-Ig can be selected for testing in human patients. DVD-Ig molecules can also be employed for treatment of other neurodegenerative diseases such as Parkinson's disease. Alpha-Synuclein is involved in Parkinson's pathology. DVD-Ig molecules capable of targeting alpha-synuclein and inflammatory mediators such as TNF, IL-1, MCP-1 can prove effective therapy for Parkinson's disease and are also embodiments.

[0260] Alternatively a DVD-Ig capable of targeting alpha-synuclein and RGM A could not only halt the pathologic progress in the substantia nigra of Parkinson disease patients but could also result in regenerative growth of damaged neurites because RGM A has been recently shown to be strongly upregulated in this area in PD patients (Bossers K. et al. (2009) Brain Pathol. 19: 91-107).

### 7.2 Neuronal Regeneration and Spinal Cord Injury

[0261] Despite an increase in knowledge of the pathologic mechanisms, spinal cord injury (SCI) is still a devastating condition and represents a medical indication characterized by a high medical need. Most spinal cord injuries are contusion or compression injuries and the primary injury is usually followed by secondary injury mechanisms (inflammatory mediators e.g., cytokines and chemokines) that worsen the initial injury and result in significant enlargement of the lesion area, sometimes more than 10-fold. These primary and secondary mechanisms in SCI are very similar to those in brain injury caused by other means, e.g., trauma and stroke. No satisfying treatment exists and high dose bolus injection of methylprednisolone (MP) is the only used therapy within a narrow time window of 8 h post injury. This treatment, however, is only intended to prevent secondary injury without causing any significant functional recovery. It is heavily critisized for the lack of unequivocal efficacy and severe adverse effects, like immunosuppression with subsequent infections and severe histopathological muscle alterations. No other drugs, biologics or small molecules, stimulating the endogenous regenerative potential are approved, but promising treatment principles and drug candidates have shown efficacy in animal models of SCI in recent years and first promising clinical data have been presented just recently. To a large extent the lack of functional recovery in human SCI is caused by factors inhibiting neurite growth, at lesion sites, in scar tissue, in myelin as well as on injury-associated cells. Such factors are the myelin-associated proteins NogoA, OMgp and MAG, RGM A, the scar-associated CSPG (Chondroitin Sulfate Proteoglycans) and inhibitory factors on reactive astrocytes (some semaphorins and ephrins). However, at the lesion site not only growth inhibitory molecules are found but also neurite growth stimulating factors like neurotrophins, laminin, L1 and others. This ensemble of neurite growth inhibitory and growth promoting molecules may explain that blocking single factors, like NogoA or RGM A, resulted in significant functional recovery in rodent SCI models, because a reduction of the inhibitory influences could shift the balance from growth inhibition to growth promotion. However, recoveries observed with blocking a single neurite outgrowth inhibitory molecule were not complete. To achieve faster and more pronounced recoveries either blocking two neurite outgrowth inhibitory molecules e.g Nogo and RGM A, or blocking an neurite outgrowth inhibitory molecule and enhancing functions of a neurite outgrowth enhancing molecule e.g Nogo and neurotrophins, or blocking a neurite outgrowth inhibitory moleclule e.g., Nogo and a pro-inflammatory molecule e.g., TNF, may be desirable (see McGee A W, et al., Trends Neurosci. 2003; 26:193; Marco Domeniconi, et al., J Neurol Sci. 2005; 233:43; Milan Makwanal, et al., FEBS J. 2005; 272:2628; Barry J. Dickson, Science. 2002; 298:1959; Felicia Yu Hsuan Teng, et al., J Neurosci Res. 2005; 79:273; Tara Karnezis, et al., Nature Neuroscience 2004; 7, 736; Gang Xu, et al., J. Neurochem. 2004; 91; 1018).

[0262] In one aspect, DVD-Igs capable of binding target pairs such as NgR and RGM A; NogoA and RGM A; MAG and RGM A; OMGp and RGM A; RGM A and RGM B; RGM A and Semaphorin 3A; RGM A and Semaphorin 4; CSPGs and RGM A; aggrecan, midkine, neurocan, versican, phosphacan, Te38 and TNF-α; Aβ globulomer-specific antibodies combined with antibodies promoting dendrite & axon sprouting are provided. Dendrite pathology and axon damage, or neuritic dystrophy are a very early sign of AD and it is known that NOGO A restricts dendrite growth and that the other molecules associated with myelin and mentioned above e.g., RGM A, MAG, OMGp impair axonal regrowth. One can combine such type of ab with any of the SCI-candidate (myelin-proteins) Ab. Other DVD-Ig targets may include any combination of NgR-p75, NgR-Troy, NgR-Nogo66 (Nogo), NgR-Lingo, Lingo-Troy, Lingo-p75, MAG or Omgp. Additionally, targets may also include any mediator, soluble or cell surface, implicated in inhibition of neurite e.g Nogo, Ompg, MAG, RGM A, semaphorins, ephrins, soluble A-b, pro-inflammatory cytokines (e.g., IL-1), chemokines (e.g., MIP 1a), molecules that inhibit nerve regeneration. The efficacy of anti-nogo/anti-RGM A or similar DVD-Ig molecules can be validated in pre-clinical animal models of spinal cord injury. In addition, these DVD-Ig molecules can be constructed and tested for efficacy in the animal models and the best therapeutic DVD-Ig can be selected for testing in human patients. In addition, DVD-Ig molecules can be constructed that target two distinct ligand binding sites on a single receptor e.g., Nogo receptor which binds three ligand Nogo, OMGp, and MAG and RAGE that binds A-b and S100 A. Furthermore, neurite outgrowth inhibitors e.g., nogo and nogo receptor, also play a role in preventing nerve regeneration in immunological diseases like multiple sclerosis. Inhibition of nogo-nogo receptor interaction has been shown to enhance recovery in animal models of multiple sclerosis. Therefore, DVD-Ig molecules that can block the function of one immune mediator e.g., a cytokine like IL-12 and a neurite outgrowth inhibitor molecule e.g., nogo or RGM may offer faster and greater efficacy than blocking either an immune or an neurite outgrowth inhibitor molecule alone.

[0263] In general, antibodies do not cross the blood brain barrier (BBB) in an efficient and relevant manner. However, in certain neurologic diseases, e.g., stroke, traumatic brain injury, multiple sclerosis, etc., the BBB may be compromised and allows for increased penetration of DVD-Igs and antibodies into the brain. In other neurological conditions, where BBB leakage is not occurring, one may employ the targeting of endogenous transport systems, including carrier-mediated transporters such as glucose and amino acid carriers and receptor-mediated transcytosis-mediating cell structures/receptors at the vascular endothelium of the BBB, thus enabling trans-BBB transport of the DVD-Ig. Structures at the BBB enabling such transport include but are not limited to the insulin receptor, transferrin receptor, LRP and RAGE. In addition, strategies enable the use of DVD-Igs also as shuttles to transport potential drugs into the CNS including low molecular weight drugs, nanoparticles and nucleic acids (Coloma M J, et al. (2000) Pharm Res. 17(3):266-74; Boado R J, et al. (2007) Bioconjug. Chem. 18(2):447-55).

[0264] DVD Igs capable of binding the following pairs of targets to treat neurological disease are contemplated: NGF and MTX; NGF and NKG2D; NGF and IGF1,2; NGF and RON; NGF and ErbB3; NGF and CD-3; NGF and IGFR; NGF and HGF; NGF and VEGF; NGF and DLL4; NGF and P1GF; NGF and CD-20; NGF and EGFR; NGF and HER-2; NGF and CD-19; NGF and CD-80; NGF and CD-22; NGF and CD-40; NGF and c-MET; and NGF and NRP1 (see Examples 2.1 to 2.60).

### 8. Oncological Disorders

[0265] Monoclonal antibody therapy has emerged as an important therapeutic modality for cancer (von Mehren, M, et al. (2003) Annu. Rev. Med. 54:343-69). Antibodies may exert antitumor effects by inducing apoptosis, redirected cytotoxicity, interfering with ligand-receptor interactions, or preventing the expression of proteins that are critical to the neoplastic phenotype. In addition, antibodies can target components of the tumor microenvironment, perturbing vital structures such as the formation of tumor-associated vasculature. Antibodies can also target receptors whose ligands are growth factors, such as the epidermal growth factor receptor. The antibody thus inhibits natural ligands that stimulate cell growth from binding to targeted tumor cells. Alternatively, antibodies may induce an anti-idiotype network, complement-mediated cytotoxicity, or antibody-dependent cellular cytotoxicity (ADCC). The use of dual-specific antibody that targets two separate tumor mediators will likely give additional benefit compared to a mono-specific therapy.

[0266] In another embodiment, a DVD provided herein is capable of binding VEGF and phosphatidylserine; VEGF and ErbB3; VEGF and PLGF; VEGF and ROBO4; VEGF and BSG2; VEGF and CDCP1; VEGF and ANPEP; VEGF and c-MET; HER-2 and ERB3; HER-2 and BSG2; HER-2 and CDCP1; HER-2 and ANPEP; EGFR and CD64; EGFR and BSG2; EGFR and CDCP1; EGFR and ANPEP; IGF1R and PDGFR; IGF1R and VEGF; IGF1R and CD20; CD20 and CD74; CD20 and CD30; CD20 and DR4; CD20 and VEGFR2; CD20 and CD52; CD20 and CD4; HGF and c-MET; HGF and NRP1; HGF and phosphatidylserine; ErbB3 and IGF1R; ErbB3 and IGF1,2; c-Met and Her-2; c-Met and NRP1; c-Met and IGF1R; IGF1,2 and PDGFR; IGF1,2 and CD20; IGF1,2 and IGF1R; IGF2 and EGFR; IGF2 and HER2; IGF2 and CD20; IGF2 and VEGF; IGF2 and IGF1R; IGF1 and IGF2; PDGFRa and VEGFR2; PDGFRa and PLGF; PDGFRa and VEGF; PDGFRa and c-Met; PDGFRa and EGFR; PDGFRb and VEGFR2; PDGFRb and c-Met; PDGFRb and EGFR; RON and c-Met; RON and MTSP1; RON and MSP; RON and CDCP1; VGFR1 and PLGF; VGFR1 and RON; VGFR1 and EGFR; VEGFR2 and PLGF; VEGFR2 and NRP1; VEGFR2 and RON; VEGFR2 and DLL4; VEGFR2 and EGFR; VEGFR2 and ROBO4; VEGFR2 and CD55; LPA and S1P; EPHB2 and RON; CTLA4 and VEGF; CD3 and EPCAM; CD40 and IL6; CD40 and IGF; CD40 and CD56; CD40 and CD70; CD40 and VEGFR1; CD40 and DR5; CD40 and DR4; CD40 and APRIL; CD40 and BCMA; CD40 and RANKL; CD28 and MAPG; CD80 and CD40; CD80 and CD30; CD80 and CD33; CD80 and CD74; CD80 and CD2; CD80 and CD3; CD80 and CD19; CD80 and CD4; CD80 and CD52; CD80 and VEGF; CD80 and DR5; CD80 and VEGFR2; CD22 and CD20; CD22 and CD80; CD22 and CD40; CD22 and CD23; CD22 and CD33; CD22 and CD74; CD22 and CD19; CD22 and DR5; CD22 and DR4; CD22 and VEGF; CD22 and CD52; CD30 and CD20; CD30 and CD22; CD30 and CD23; CD30 and CD40; CD30 and VEGF; CD30 and CD74; CD30 and CD19; CD30 and DR5; CD30 and DR4; CD30 and VEGFR2; CD30 and CD52; CD30 and CD4; CD138 and RANKL; CD33 and FTL3; CD33 and VEGF; CD33 and VEGFR2; CD33 and CD44; CD33 and DR4; CD33 and DR5; DR4 and CD137; DR4 and IGF1,2; DR4 and IGF1R; DR4 and DR5; DR5 and CD40; DR5 and CD137; DR5 and CD20; DR5 and EGFR; DR5 and IGF1,2; DR5 and IGFR, DR5 and HER-2, and EGFR and DLL4. Other target combinations include one or more members of the EGF/erb-2/erb-3 family. Other targets (one or more) involved in oncological diseases that DVD Igs may bind include, but are not limited to: CD52, CD20, CD19, CD3, CD4, CD8, BMP6, IL12A, IL1A, IL1B, IL2, IL24, INHA, TNF, TNFSF10, BMP6, EGF, FGF1, FGF10, FGF11, FGF12, FGF13, FGF14, FGF16, FGF17, FGF18, FGF19, FGF2, FGF20, FGF21, FGF22, FGF23, FGF3, FGF4, FGF5, FGF6, FGF7, FGF8, FGF9, GRP, IGF1, IGF2, IL12A, IL1A, IL1B, IL2, INHA, TGFα, TGFB1, TGFB2, TGFB3, VEGF, CDK2, FGF10, FGF18, FGF2, FGF4, FGF7, IGF1R, IL2, BCL2, CD164, CDKN1A, CDKN1B, CDKN1C, CDKN2A, CDKN2B, CDKN2C, CDKN3, GNRH1, IGFBP6, IL1A, IL1B, ODZ1, PAWR, PLG, TGFB111, AR, BRCA1, CDK3, CDK4, CDK5, CDK6, CDK7, CDK9, E2F1, EGFR, ENO1, ERBB2, ESR1, ESR2, IGFBP3, IGFBP6, IL2, INSL4, MYC, NOX5, NR6A1, PAP, PCNA, PRKCQ, PRKD1, PRL, TP53, FGF22, FGF23, FGF9, IGFBP3, IL2, INHA, KLK6, TP53, CHGB, GNRH1, IGF1, IGF2, INHA, INSL3, INSL4, PRL, KLK6, SHBG, NR1D1, NR1H3, NR113, NR2F6, NR4A3, ESR1, ESR2, NROB1, NROB2, NR1D2, NR1H2, NR1H4, NR112, NR2C1, NR2C2, NR2E1, NR2E3, NR2F1, NR2F2, NR3C1, NR3C2, NR4A1, NR4A2, NR5A1, NR5A2, NR6A1, PGR, RARB, FGF1, FGF2, FGF6, KLK3, KRT1, APOCl, BRCA1, CHGA, CHGB, CLU, COL1A1, COL6A1, EGF, ERBB2, ERK8, FGF1, FGF10, FGF11, FGF13, FGF14, FGF16, FGF17, FGF18, FGF2, FGF20, FGF21, FGF22, FGF23, FGF3, FGF4, FGF5, FGF6, FGF7, FGF8, FGF9, GNRH1, IGF1, IGF2, IGFBP3, IGFBP6, IL12A, IL1A, IL1B, IL2, IL24, INHA, INSL3, INSL4, KLK10, KLK12, KLK13, KLK14, KLK15, KLK3, KLK4, KLK5, KLK6, KLK9, MMP2, MMP9, MSMB, NTN4, ODZ1, PAP, PLAU, PRL, PSAP, SERPINA3, SHBG, TGFα, TIMP3, CD44, CDH1, CDH10, CDH19, CDH20, CDH7, CDH9, CDH1, CDH10, CDH13, CDH18, CDH19, CDH20, CDH7, CDH8, CDH9, ROBO2, CD44, ILK, ITGA1, APC, CD164, COL6A1, MTSS1, PAP, TGFB111, AGR2, AIG1, AKAP1, AKAP2, CANT1, CAV1, CDH12, CLDN3, CLN3, CYB5, CYC1, DAB21P, DES, DNCL1, ELAC2, ENO2, ENO3, FASN, FLJ12584, FLJ25530, GAGEB1, GAGEC1, GGT1, GSTP1, HIP1, HUMCYT2A, IL29, K6HF, KAI1, KRT2A, MIB1, PART1, PATE, PCA3, PIAS2, PIK3CG, PPID, PR1, PSCA, SLC2A2, SLC33A1, SLC43A1, STEAP, STEAP2, TPM1, TPM2, TRPC6, ANGPT1, ANGPT2, ANPEP, ECGF1, EREG, FGF1, FGF2, FIGF, FLT1, JAG1, KDR, LAMAS, NRP1, NRP2, PGF, PLXDC1, STAB1, VEGF, VEGFC, ANGPTL3, BAIL COL4A3, IL8, LAMAS, NRP1, NRP2, STAB1, ANGPTL4, PECAM1, PF4, PROK2, SERPINF1, TNFAIP2, CCL11, CCL2, CXCL1, CXCL10, CXCL3, CXCL5, CXCL6, CXCL9, IFNα1, IFNB1, IFNG, IL1B, IL6, MDK, EDG1, EFNA1, EFNA3, EFNB2, EGF, EPHB4, FGFR3, HGF, IGF1, ITGB3, PDGFA, TEK, TGFA, TGFB1, TGFB2, TGFBR1, CCL2, CDH5, COL18A1, EDG1, ENG, ITGAV, ITGB3, THBS1, THBS2, BAD, BAG1, BCL2, CCNA1, CCNA2, CCND1, CCNE1, CCNE2, CDH1 (E-cadherin), CDKN1B (p27Kip1), CDKN2A (p161NK4a), COL6A1, CTNNB1 (b-catenin), CTSB (cathepsin B), ERBB2 (Her-2), ESR1, ESR2, F3 (TF), FOSL1 (FRA-1), GATA3, GSN (Gelsolin), IGFBP2, IL2RA, IL6, IL6R, IL6ST (glycoprotein 130), ITGA6 (a6 integrin), JUN, KLK5, KRT19, MAP2K7 (c-Jun), MKI67 (Ki-67), NGFB (NGF), NGFR, NME1 (NM23A), PGR, PLAU (uPA), PTEN, SERPINB5 (maspin), SERPINE1 (PAI-1), TGFα, THBS1 (thrombospondin-1), TIE (Tie-1), TNFRSF6 (Fas), TNFSF6 (FasL), TOP2A (topoisomerase Ea), TP53, AZGP1 (zinc-a-glycoprotein), BPAG1 (plectin), CDKN1A (p21Wapl/Cipl), CLDN7 (claudin-7), CLU (clusterin), ERBB2 (Her-2), FGF1, FLRT1 (fibronectin), GABRP (GABAa), GNAS1, ID2, ITGA6 (a6 integrin), ITGB4 (b 4 integrin), KLF5 (GC Box BP), KRT19 (Keratin 19), KRTHB6 (hair-specific type II keratin), MACMARCKS, MT3 (metallothionectin-III), MUC1 (mucin), PTGS2 (COX-2), RAC2 (p21Rac2), S100A2, SCGB1D2 (lipophilin B), SCGB2A1 (mammaglobin 2), SCGB2A2 (mammaglobin 1), SPRR1B (Spr1), THBS1, THBS2, THBS4, and TNFAIP2 (B94), RON, c-Met, CD64, DLL4, PLGF, CTLA4, phophatidylserine, ROBO4, CD80, CD22, CD40, CD23, CD28, CD80, CD55, CD38, CD70, CD74, CD30, CD138, CD56, CD33, CD2, CD137, DR4, DRS, RANKL, VEGFR2, PDGFR, VEGFR1, MTSP1, MSP, EPHB2, EPHA1, EPHA2, EpCAM, PGE2, NKG2D, LPA, SIP, APRIL, BCMA, MAPG, FLT3, PDGFR alpha, PDGFR beta, ROR1, PSMA, PSCA, SCD1, or CD59.

### IV. Pharmaceutical Compositions

[0267] Pharmaceutical compositions comprising a binding protein, of the invention and a pharmaceutically acceptable carrier are provided. The pharmaceutical compositions comprising binding proteins provided herein are for use in, but not limited to, diagnosing, detecting, or monitoring a disorder, in preventing, treating, managing, or ameliorating of a disorder or one or more symptoms thereof, and/or in research. In a specific embodiment, a composition comprises one or more binding proteins provided herein. In another embodiment, the pharmaceutical composition comprises one or more binding proteins provided herein and one or more prophylactic or therapeutic agents other than binding proteins provided herein for treating a disorder. In an embodiment, the prophylactic or therapeutic agents known to be useful for or having been or currently being used in the prevention, treatment, management, or amelioration of a disorder or one or more symptoms thereof. In accordance with these embodiments, the composition may further comprise of a carrier, diluent or excipient.

[0268] The binding proteins provided herein can be incorporated into pharmaceutical compositions suitable for administration to a subject. Typically, the pharmaceutical composition comprises a binding protein provided herein and a pharmaceutically acceptable carrier. As used herein, “pharmaceutically acceptable carrier” includes any and all solvents, dispersion media, coatings, antibacterial and antifungal agents, isotonic and absorption delaying agents, and the like that are physiologically compatible. Examples of pharmaceutically acceptable carriers include one or more of water, saline, phosphate buffered saline, dextrose, glycerol, ethanol and the like, as well as combinations thereof. In some embodiments, isotonic agents, for example, sugars, polyalcohols such as mannitol, sorbitol, or sodium chloride, are included in the composition. Pharmaceutically acceptable carriers may further comprise minor amounts of auxiliary substances such as wetting or emulsifying agents, preservatives or buffers, which enhance the shelf life or effectiveness of the antibody or antibody portion.

[0269] Various delivery systems are known and can be used to administer one or more antibodies provided herein or the combination of one or more antibodies provided herein and a prophylactic agent or therapeutic agent useful for preventing, managing, treating, or ameliorating a disorder or one or more symptoms thereof, e.g., encapsulation in liposomes, microparticles, microcapsules, recombinant cells capable of expressing the antibody or antibody fragment, receptor-mediated endocytosis (see, e.g., Wu and Wu, J. Biol. Chem. 262:4429-4432 (1987)), construction of a nucleic acid as part of a retroviral or other vector, etc. Methods of administering a prophylactic or therapeutic agent provided herein include, but are not limited to, parenteral administration (e.g., intradermal, intramuscular, intraperitoneal, intravenous and subcutaneous), epidurala administration, intratumoral administration, and mucosal administration (e.g., intranasal and oral routes). In addition, pulmonary administration can be employed, e.g., by use of an inhaler or nebulizer, and formulation with an aerosolizing agent. See, e.g., U.S. Pat. Nos. 6,019,968; 5,985,320; 5,985,309; 5,934,272; 5,874,064; 5,855,913; 5,290,540; and 4,880,078; and PCT Publication Nos. WO 92/19244; WO 97/32572; WO 97/44013; WO 98/31346; and WO 99/66903, each of which is incorporated herein by reference their entireties. In one embodiment, a binding protein provided herein, combination therapy, or a composition provided herein is administered using Alkermes AIR® pulmonary drug delivery technology (Alkermes, Inc., Cambridge, Mass.). In a specific embodiment, prophylactic or therapeutic agents provided herein are administered intramuscularly, intravenously, intratumorally, orally, intranasally, pulmonary, or subcutaneously. The prophylactic or therapeutic agents may be administered by any convenient route, for example by infusion or bolus injection, by absorption through epithelial or mucocutaneous linings (e.g., oral mucosa, rectal and intestinal mucosa, etc.) and may be administered together with other biologically active agents. Administration can be systemic or local.

[0270] In an embodiment, specific binding of antibody-coupled carbon nanotubes (CNTs) to tumor cells in vitro, followed by their highly specific ablation with near-infrared (NIR) light can be used to target tumor cells. For example, biotinylated polar lipids can be used to prepare stable, biocompatible, noncytotoxic CNT dispersions that are then attached to one or two different neutralite avidin-derivatized DVD-Igs directed against one or more tumor antigens (e.g., CD22) (Chakravarty, P. et al. (2008) Proc. Natl. Acad. Sci. USA 105:8697-8702.

[0271] In a specific embodiment, it may be desirable to administer the prophylactic or therapeutic agents provided herein locally to the area in need of treatment; this may be achieved by, for example, and not by way of limitation, local infusion, by injection, or by means of an implant, said implant being of a porous or non-porous material, including membranes and matrices, such as sialastic membranes, polymers, fibrous matrices (e.g., Tissuel®), or collagen matrices. In one embodiment, an effective amount of one or more antibodies provided herein antagonists is administered locally to the affected area to a subject to prevent, treat, manage, and/or ameliorate a disorder or a symptom thereof. In another embodiment, an effective amount of one or more antibodies provided herein is administered locally to the affected area in combination with an effective amount of one or more therapies (e.g., one or more prophylactic or therapeutic agents) other than a binding protein provided herein to a subject to prevent, treat, manage, and/or ameliorate a disorder or one or more symptoms thereof.

[0272] In another embodiment, the prophylactic or therapeutic agent can be delivered in a controlled release or sustained release system. In one embodiment, a pump may be used to achieve controlled or sustained release (see Langer, supra; Sefton, 1987, CRC Crit. Ref. Biomed. Eng. 14:20; Buchwald et al., 1980, Surgery 88:507; Saudek et al., 1989, N. Engl. J. Med. 321:574). In another embodiment, polymeric materials can be used to achieve controlled or sustained release of the therapies (see e.g., Medical Applications of Controlled Release, Langer and Wise (eds.), CRC Pres., Boca Raton, Fla. (1974); Controlled Drug Bioavailability, Drug Product Design and Performance, Smolen and Ball (eds.), Wiley, New York (1984); Ranger and Peppas, 1983, J., Macromol. Sci. Rev. Macromol. Chem. 23:61; see also Levy et al., 1985, Science 228:190; During et al., 1989, Ann. Neurol. 25:351; Howard et al., 1989, J. Neurosurg. 7 1:105); U.S. Pat. No. 5,679,377; U.S. Pat. No. 5,916,597; U.S. Pat. No. 5,912,015; U.S. Pat. No. 5,989,463; U.S. Pat. No. 5,128,326; PCT Publication No. WO 99/15154; and PCT Publication No. WO 99/20253. Examples of polymers used in sustained release formulations include, but are not limited to, poly(-hydroxy ethyl methacrylate), poly(methyl methacrylate), poly(acrylic acid), poly(ethylene-co-vinyl acetate), poly(methacrylic acid), polyglycolides (PLG), polyanhydrides, poly(N-vinyl pyrrolidone), poly(vinyl alcohol), polyacrylamide, poly(ethylene glycol), polylactides (PLA), poly(lactide-co-glycolides) (PLGA), and polyorthoesters. In an embodiment, the polymer used in a sustained release formulation is inert, free of leachable impurities, stable on storage, sterile, and biodegradable. In yet another embodiment, a controlled or sustained release system can be placed in proximity of the prophylactic or therapeutic target, thus requiring only a fraction of the systemic dose (see, e.g., Goodson, in Medical Applications of Controlled Release, supra, vol. 2, pp. 115-138 (1984)).

[0273] Controlled release systems are discussed in the review by Langer (1990, Science 249:1527-1533). Any technique known to one of skill in the art can be used to produce sustained release formulations comprising one or more therapeutic agents provided herein. See, e.g., U.S. Pat. No. 4,526,938, PCT publication WO 91/05548, PCT publication WO 96/20698, Ning et al., 1996, “Intratumoral Radioimmunotheraphy of a Human Colon Cancer Xenograft Using a Sustained-Release Gel,” Radiotherapy &Oncology 39:179-189, Song et al., 1995, “Antibody Mediated Lung Targeting of Long-Circulating Emulsions,” PDA Journal of Pharmaceutical Science &Technology 50:372-397, Cleek et al., 1997, “Biodegradable Polymeric Carriers for a bFGF Antibody for Cardiovascular Application,” Pro. Intl. Symp. Control. Rel. Bioact. Mater. 24:853-854, and Lam et al., 1997, “Microencapsulation of Recombinant Humanized Monoclonal Antibody for Local Delivery,” Proc. Intl. Symp. Control Rel. Bioact. Mater. 24:759-760, each of which is incorporated herein by reference in their entireties.

[0274] In a specific embodiment, where the composition is a nucleic acid encoding a prophylactic or therapeutic agent, the nucleic acid can be administered in vivo to promote expression of its encoded prophylactic or therapeutic agent, by constructing it as part of an appropriate nucleic acid expression vector and administering it so that it becomes intracellular, e.g., by use of a retroviral vector (see U.S. Pat. No. 4,980,286), or by direct injection, or by use of microparticle bombardment (e.g., a gene gun; Biolistic, Dupont), or coating with lipids or cell-surface receptors or transfecting agents, or by administering it in linkage to a homeobox-like peptide which is known to enter the nucleus (see, e.g., Joliot et al., 1991, Proc. Natl. Acad. Sci. USA 88:1864-1868). Alternatively, a nucleic acid can be introduced intracellularly and incorporated within host cell DNA for expression by homologous recombination.

[0275] A pharmaceutical composition provided herein is formulated to be compatible with its intended route of administration. Examples of routes of administration include, but are not limited to, parenteral, e.g., intravenous, intradermal, subcutaneous, oral, intranasal (e.g., inhalation), transdermal (e.g., topical), transmucosal, and rectal administration. In a specific embodiment, the composition is formulated in accordance with routine procedures as a pharmaceutical composition adapted for intravenous, subcutaneous, intramuscular, oral, intranasal, or topical administration to human beings. Typically, compositions for intravenous administration are solutions in sterile isotonic aqueous buffer. Where necessary, the composition may also include a solubilizing agent and a local anesthetic such as lignocamne to ease pain at the site of the injection.

[0276] If the compositions are to be administered topically, the compositions can be formulated in the form of an ointment, cream, transdermal patch, lotion, gel, shampoo, spray, aerosol, solution, emulsion, or other form well-known to one of skill in the art. See, e.g., Remington's Pharmaceutical Sciences and Introduction to Pharmaceutical Dosage Forms, 19th ed., Mack Pub. Co., Easton, Pa. (1995). In an embodiment, for non-sprayable topical dosage forms, viscous to semi-solid or solid forms comprising a carrier or one or more excipients compatible with topical application and having a dynamic viscosity greater than water are employed. Suitable formulations include, without limitation, solutions, suspensions, emulsions, creams, ointments, powders, liniments, salves, and the like, which are, if desired, sterilized or mixed with auxiliary agents (e.g., preservatives, stabilizers, wetting agents, buffers, or salts) for influencing various properties, such as, for example, osmotic pressure. Other suitable topical dosage forms include sprayable aerosol preparations wherein the active ingredient, in an embodiment, in combination with a solid or liquid inert carrier, is packaged in a mixture with a pressurized volatile (e.g., a gaseous propellant, such as freon) or in a squeeze bottle. Moisturizers or humectants can also be added to pharmaceutical compositions and dosage forms if desired. Examples of such additional ingredients are well-known in the art.

[0277] If the method comprises intranasal administration of a composition, the composition can be formulated in an aerosol form, spray, mist or in the form of drops. In particular, prophylactic or therapeutic agents can be conveniently delivered in the form of an aerosol spray presentation from pressurized packs or a nebuliser, with the use of a suitable propellant (e.g., dichlorodifluoromethane, trichlorofluoromethane, dichlorotetrafluoroethane, carbon dioxide or other suitable gas). In the case of a pressurized aerosol the dosage unit may be determined by providing a valve to deliver a metered amount. Capsules and cartridges (composed of, e.g., gelatin) for use in an inhaler or insufflator may be formulated containing a powder mix of the compound and a suitable powder base such as lactose or starch.

[0278] If the method comprises oral administration, compositions can be formulated orally in the form of tablets, capsules, cachets, gelcaps, solutions, suspensions, and the like. Tablets or capsules can be prepared by conventional means with pharmaceutically acceptable excipients such as binding agents (e.g., pregelatinised maize starch, polyvinylpyrrolidone, or hydroxypropyl methylcellulose); fillers (e.g., lactose, microcrystalline cellulose, or calcium hydrogen phosphate); lubricants (e.g., magnesium stearate, talc, or silica); disintegrants (e.g., potato starch or sodium starch glycolate); or wetting agents (e.g., sodium lauryl sulphate). The tablets may be coated by methods well-known in the art. Liquid preparations for oral administration may take the form of, but not limited to, solutions, syrups or suspensions, or they may be presented as a dry product for constitution with water or other suitable vehicle before use. Such liquid preparations may be prepared by conventional means with pharmaceutically acceptable additives such as suspending agents (e.g., sorbitol syrup, cellulose derivatives, or hydrogenated edible fats); emulsifying agents (e.g., lecithin or acacia); non-aqueous vehicles (e.g., almond oil, oily esters, ethyl alcohol, or fractionated vegetable oils); and preservatives (e.g., methyl or propyl-p-hydroxybenzoates or sorbic acid). The preparations may also contain buffer salts, flavoring, coloring, and sweetening agents as appropriate. Preparations for oral administration may be suitably formulated for slow release, controlled release, or sustained release of a prophylactic or therapeutic agent(s).

[0279] The method provided herein may comprise pulmonary administration, e.g., by use of an inhaler or nebulizer, of a composition formulated with an aerosolizing agent. See, e.g., U.S. Pat. Nos. 6,019,968; 5,985,320; 5,985,309; 5,934,272; 5,874,064; 5,855,913; 5,290,540; and 4,880,078; and PCT Publication Nos. WO 92/19244; WO 97/32572; WO 97/44013; WO 98/31346; and WO 99/66903, each of which is incorporated herein by reference their entireties. In a specific embodiment, a binding protein provided herein, combination therapy, and/or composition provided herein is administered using Alkermes AIR® pulmonary drug delivery technology (Alkermes, Inc., Cambridge, Mass.).

[0280] The method may comprise administration of a composition formulated for parenteral administration by injection (e.g., by bolus injection or continuous infusion). Formulations for injection may be presented in unit dosage form (e.g., in ampoules or in multi-dose containers) with an added preservative. The compositions may take such forms as suspensions, solutions or emulsions in oily or aqueous vehicles, and may contain formulatory agents such as suspending, stabilizing and/or dispersing agents. Alternatively, the active ingredient may be in powder form for constitution with a suitable vehicle (e.g., sterile pyrogen-free water) before use.

[0281] The methods provided herein may additionally comprise of administration of compositions formulated as depot preparations. Such long acting formulations may be administered by implantation (e.g., subcutaneously or intramuscularly) or by intramuscular injection. Thus, for example, the compositions may be formulated with suitable polymeric or hydrophobic materials (e.g., as an emulsion in an acceptable oil) or ion exchange resins, or as sparingly soluble derivatives (e.g., as a sparingly soluble salt).

[0282] The methods provided herein encompasse administration of compositions formulated as neutral or salt forms. Pharmaceutically acceptable salts include those formed with anions such as those derived from hydrochloric, phosphoric, acetic, oxalic, tartaric acids, etc., and those formed with cations such as those derived from sodium, potassium, ammonium, calcium, ferric hydroxides, isopropylamine, triethylamine, 2-ethylamino ethanol, histidine, procaine, etc.

[0283] Generally, the ingredients of compositions are supplied either separately or mixed together in unit dosage form, for example, as a dry lyophilized powder or water free concentrate in a hermetically sealed container such as an ampoule or sachette indicating the quantity of active agent. Where the mode of administration is infusion, composition can be dispensed with an infusion bottle containing sterile pharmaceutical grade water or saline. Where the mode of administration is by injection, an ampoule of sterile water for injection or saline can be provided so that the ingredients may be mixed prior to administration.

[0284] In one embodiment, one or more of the prophylactic or therapeutic agents, or pharmaceutical compositions provided herein is packaged in a hermetically sealed container such as an ampoule or sachette indicating the quantity of the agent. In one embodiment, one or more of the prophylactic or therapeutic agents, or pharmaceutical compositions provided herein is supplied as a dry sterilized lyophilized powder or water free concentrate in a hermetically sealed container and can be reconstituted (e.g., with water or saline) to the appropriate concentration for administration to a subject. In an embodiment, one or more of the prophylactic or therapeutic agents or pharmaceutical compositions provided herein is supplied as a dry sterile lyophilized powder in a hermetically sealed container at a unit dosage of at least 5 mg, at least 10 mg, at least 15 mg, at least 25 mg, at least 35 mg, at least 45 mg, at least 50 mg, at least 75 mg, or at least 100 mg. The lyophilized prophylactic or therapeutic agents or pharmaceutical compositions provided herein should be stored at between 2° C. and 8° C. in its original container and the prophylactic or therapeutic agents, or pharmaceutical compositions provided herein should be administered within 1 week, e.g., within 5 days, within 72 hours, within 48 hours, within 24 hours, within 12 hours, within 6 hours, within 5 hours, within 3 hours, or within 1 hour after being reconstituted. In an alternative embodiment, one or more of the prophylactic or therapeutic agents or pharmaceutical compositions provided herein is supplied in liquid form in a hermetically sealed container indicating the quantity and concentration of the agent. In an embodiment, the liquid form of the administered composition is supplied in a hermetically sealed container at least 0.25 mg/ml, at least 0.5 mg/ml, at least 1 mg/ml, at least 2.5 mg/ml, at least 5 mg/ml, at least 8 mg/ml, at least 10 mg/ml, at least 15 mg/kg, at least 25 mg/ml, at least 50 mg/ml, at least 75 mg/ml or at least 100 mg/ml. The liquid form should be stored at between 2° C. and 8° C. in its original container.

[0285] The binding proteins provided herein can be incorporated into a pharmaceutical composition suitable for parenteral administration. In an embodiment, the antibody or antibody-portions will be prepared as an injectable solution containing 0.1-250 mg/ml binding protein. The injectable solution can be composed of either a liquid or lyophilized dosage form in a flint or amber vial, ampule or pre-filled syringe. The buffer can be L-histidine (1-50 mM), optimally 5-10 mM, at pH 5.0 to 7.0 (optimally pH 6.0). Other suitable buffers include but are not limited to, sodium succinate, sodium citrate, sodium phosphate or potassium phosphate. Sodium chloride can be used to modify the toxicity of the solution at a concentration of 0-300 mM (optimally 150 mM for a liquid dosage form). Cryoprotectants can be included for a lyophilized dosage form, principally 0-10% sucrose (optimally 0.5-1.0%). Other suitable cryoprotectants include trehalose and lactose. Bulking agents can be included for a lyophilized dosage form, principally 1-10% mannitol (optimally 2-4%). Stabilizers can be used in both liquid and lyophilized dosage forms, principally 1-50 mM L-Methionine (optimally 5-10 mM). Other suitable bulking agents include glycine, arginine, can be included as 0-0.05% polysorbate-80 (optimally 0.005-0.01%). Additional surfactants include but are not limited to polysorbate 20 and BRIT surfactants. The pharmaceutical composition comprising the binding proteins provided herein prepared as an injectable solution for parenteral administration, can further comprise an agent useful as an adjuvant, such as those used to increase the absorption, or dispersion of a therapeutic protein (e.g., antibody). A particularly useful adjuvant is hyaluronidase, such as Hylenex® (recombinant human hyaluronidase). Addition of hyaluronidase in the injectable solution improves human bioavailability following parenteral administration, particularly subcutaneous administration. It also allows for greater injection site volumes (i.e. greater than 1 ml) with less pain and discomfort, and minimum incidence of injection site reactions. (see WO2004078140, and US2006104968 incorporated herein by reference).

[0286] The compositions provided herein may be in a variety of forms. These include, for example, liquid, semi-solid and solid dosage forms, such as liquid solutions (e.g., injectable and infusible solutions), dispersions or suspensions, tablets, pills, powders, liposomes and suppositories. The form chosen depends on the intended mode of administration and therapeutic application. Typical compositions are in the form of injectable or infusible solutions, such as compositions similar to those used for passive immunization of humans with other antibodies. The chosen mode of administration is parenteral (e.g., intravenous, subcutaneous, intraperitoneal, intramuscular). In an embodiment, the antibody is administered by intravenous infusion or injection. In another embodiment, the antibody is administered by intramuscular or subcutaneous injection.

[0287] Therapeutic compositions typically must be sterile and stable under the conditions of manufacture and storage. The composition can be formulated as a solution, microemulsion, dispersion, liposome, or other ordered structure suitable to high drug concentration. Sterile injectable solutions can be prepared by incorporating the active compound (I.e., antibody or antibody portion) in the required amount in an appropriate solvent with one or a combination of ingredients enumerated herein, as required, followed by filtered sterilization. Generally, dispersions are prepared by incorporating the active compound into a sterile vehicle that contains a basic dispersion medium and the required other ingredients from those enumerated herein. In the case of sterile, lyophilized powders for the preparation of sterile injectable solutions, the methods of preparation are vacuum drying and spray-drying that yields a powder of the active ingredient plus any additional desired ingredient from a previously sterile-filtered solution thereof. The proper fluidity of a solution can be maintained, for example, by the use of a coating such as lecithin, by the maintenance of the required particle size in the case of dispersion and by the use of surfactants. Prolonged absorption of injectable compositions can be brought about by including, in the composition, an agent that delays absorption, for example, monostearate salts and gelatin.

[0288] The binding proteins provided herein can be administered by a variety of methods known in the art, although for many therapeutic applications, in an embodiment, the route/mode of administration is subcutaneous injection, intravenous injection or infusion. As will be appreciated by the skilled artisan, the route and/or mode of administration will vary depending upon the desired results. In certain embodiments, the active compound may be prepared with a carrier that will protect the compound against rapid release, such as a controlled release formulation, including implants, transdermal patches, and microencapsulated delivery systems. Biodegradable, biocompatible polymers can be used, such as ethylene vinyl acetate, polyanhydrides, polyglycolic acid, collagen, polyorthoesters, and polylactic acid. Many methods for the preparation of such formulations are patented or generally known to those skilled in the art. See, e.g., Sustained and Controlled Release Drug Delivery Systems, J. R. Robinson, ed., Marcel Dekker, Inc., New York, 1978.

[0289] In certain embodiments, a binding protein provided herein may be orally administered, for example, with an inert diluent or an assimilable edible carrier. The compound (and other ingredients, if desired) may also be enclosed in a hard or soft shell gelatin capsule, compressed into tablets, or incorporated directly into the subject's diet. For oral therapeutic administration, the compounds may be incorporated with excipients and used in the form of ingestible tablets, buccal tablets, troches, capsules, elixirs, suspensions, syrups, wafers, and the like. To administer a compound provided herein by other than parenteral administration, it may be necessary to coat the compound with, or co-administer the compound with, a material to prevent its inactivation.

[0290] Supplementary active compounds can also be incorporated into the compositions. In certain embodiments, a binding protein provided herein is coformulated with and/or coadministered with one or more additional therapeutic agents that are useful for treating disorders with a binding protein provided herein. For example, a binding protein provided herein may be coformulated and/or coadministered with one or more additional antibodies that bind other targets (e.g., antibodies that bind other cytokines or that bind cell surface molecules). Furthermore, one or more antibodies provided herein may be used in combination with two or more of the foregoing therapeutic agents. Such combination therapies may advantageously utilize lower dosages of the administered therapeutic agents, thus avoiding possible toxicities or complications associated with the various monotherapies.

[0291] In certain embodiments, a binding protein is linked to a half-life extending vehicle known in the art. Such vehicles include, but are not limited to, the Fc domain, polyethylene glycol, and dextran. Such vehicles are described, e.g., in U.S. application Ser. No. 09/428,082 and published PCT Application No. WO 99/25044, which are hereby incorporated by reference for any purpose.

[0292] In a specific embodiment, nucleic acid sequences encoding a binding protein provided herein or another prophylactic or therapeutic agent provided herein are administered to treat, prevent, manage, or ameliorate a disorder or one or more symptoms thereof by way of gene therapy. Gene therapy refers to therapy performed by the administration to a subject of an expressed or expressible nucleic acid. In this embodiment, the nucleic acids produce their encoded antibody or prophylactic or therapeutic agent provided herein that mediates a prophylactic or therapeutic effect.

[0293] Any of the methods for gene therapy available in the art can be used in the methods provided herein. For general reviews of the methods of gene therapy, see Goldspiel et al., 1993, Clinical Pharmacy 12:488-505; Wu and Wu, 1991, Biotherapy 3:87-95; Tolstoshev, 1993, Ann. Rev. Pharmacol. Toxicol. 32:573-596; Mulligan, Science 260:926-932 (1993); and Morgan and Anderson, 1993, Ann. Rev. Biochem. 62:191-217; May, 1993, TIBTECH 11(5):155-215. Methods commonly known in the art of recombinant DNA technology which can be used are described in Ausubel et al. (eds.), Current Protocols in Molecular Biology, John Wiley &Sons, NY (1993); and Kriegler, Gene Transfer and Expression, A Laboratory Manual, Stockton Press, NY (1990). Detailed description of various methods of gene therapy are disclosed in US20050042664 A1 which is incorporated herein by reference.

[0294] The binding proteins provided herein are useful in treating various diseases wherein the targets that are recognized by the binding proteins are detrimental. Such diseases include, but are not limited to, rheumatoid arthritis, osteoarthritis, juvenile chronic arthritis, septic arthritis, Lyme arthritis, psoriatic arthritis, reactive arthritis, spondyloarthropathy, systemic lupus erythematosus, Crohn's disease, ulcerative colitis, inflammatory bowel disease, insulin dependent diabetes mellitus, thyroiditis, asthma, allergic diseases, psoriasis, dermatitis scleroderma, graft versus host disease, organ transplant rejection, acute or chronic immune disease associated with organ transplantation, sarcoidosis, atherosclerosis, disseminated intravascular coagulation, Kawasaki's disease, Grave's disease, nephrotic syndrome, chronic fatigue syndrome, Wegener's granulomatosis, Henoch-Schoenlein purpurea, microscopic vasculitis of the kidneys, chronic active hepatitis, uveitis, septic shock, toxic shock syndrome, sepsis syndrome, cachexia, infectious diseases, parasitic diseases, acquired immunodeficiency syndrome, acute transverse myelitis, Huntington's chorea, Parkinson's disease, Alzheimer's disease, stroke, primary biliary cirrhosis, hemolytic anemia, malignancies, heart failure, myocardial infarction, Addison's disease, sporadic, polyglandular deficiency type I and polyglandular deficiency type II, Schmidt's syndrome, adult (acute) respiratory distress syndrome, alopecia, alopecia greata, seronegative arthopathy, arthropathy, Reiter's disease, psoriatic arthropathy, ulcerative colitic arthropathy, enteropathic synovitis, chlamydia, yersinia and salmonella associated arthropathy, spondyloarthopathy, atheromatous disease/arteriosclerosis, atopic allergy, autoimmune bullous disease, pemphigus vulgaris, pemphigus foliaceus, pemphigoid, linear IgA disease, autoimmune haemolytic anaemia, Coombs positive haemolytic anaemia, acquired pernicious anaemia, juvenile pernicious anaemia, myalgic encephalitis/Royal Free Disease, chronic mucocutaneous candidiasis, giant cell arteritis, primary sclerosing hepatitis, cryptogenic autoimmune hepatitis, Acquired Immunodeficiency Disease Syndrome, Acquired Immunodeficiency Related Diseases, Hepatitis B, Hepatitis C, common varied immunodeficiency (common variable hypogammaglobulinaemia), dilated cardiomyopathy, female infertility, ovarian failure, premature ovarian failure, fibrotic lung disease, cryptogenic fibrosing alveolitis, post-inflammatory interstitial lung disease, interstitial pneumonitis, connective tissue disease associated interstitial lung disease, mixed connective tissue disease associated lung disease, systemic sclerosis associated interstitial lung disease, rheumatoid arthritis associated interstitial lung disease, systemic lupus erythematosus associated lung disease, dermatomyositis/polymyositis associated lung disease, Sjogren's disease associated lung disease, ankylosing spondylitis associated lung disease, vasculitic diffuse lung disease, haemosiderosis associated lung disease, drug-induced interstitial lung disease, fibrosis, radiation fibrosis, bronchiolitis obliterans, chronic eosinophilic pneumonia, lymphocytic infiltrative lung disease, postinfectious interstitial lung disease, gouty arthritis, autoimmune hepatitis, type-1 autoimmune hepatitis (classical autoimmune or lupoid hepatitis), type-2 autoimmune hepatitis (anti-LKM antibody hepatitis), autoimmune mediated hypoglycaemia, type B insulin resistance with acanthosis nigricans, hypoparathyroidism, acute immune disease associated with organ transplantation, chronic immune disease associated with organ transplantation, osteoarthrosis, primary sclerosing cholangitis, psoriasis type 1, psoriasis type 2, idiopathic leucopaenia, autoimmune neutropaenia, renal disease NOS, glomerulonephritides, microscopic vasulitis of the kidneys, lyme disease, discoid lupus erythematosus, male infertility idiopathic or NOS, sperm autoimmunity, multiple sclerosis (all subtypes), sympathetic ophthalmia, pulmonary hypertension secondary to connective tissue disease, Goodpasture's syndrome, pulmonary manifestation of polyarteritis nodosa, acute rheumatic fever, rheumatoid spondylitis, Still's disease, systemic sclerosis, Sjorgren's syndrome, Takayasu's disease/arteritis, autoimmune thrombocytopaenia, idiopathic thrombocytopaenia, autoimmune thyroid disease, hyperthyroidism, goitrous autoimmune hypothyroidism (Hashimoto's disease), atrophic autoimmune hypothyroidism, primary myxoedema, phacogenic uveitis, primary vasculitis, vitiligo acute liver disease, chronic liver diseases, alcoholic cirrhosis, alcohol-induced liver injury, choleosatatis, idiosyncratic liver disease, Drug-Induced hepatitis, Non-alcoholic Steatohepatitis, allergy and asthma, group B streptococci (GBS) infection, mental disorders (e.g., depression and schizophrenia), Th2 Type and Th1 Type mediated diseases, acute and chronic pain (different forms of pain), and cancers such as lung, breast, stomach, bladder, colon, pancreas, ovarian, prostate and rectal cancer and hematopoietic malignancies (leukemia and lymphoma), Abetalipoprotemia, Acrocyanosis, acute and chronic parasitic or infectious processes, acute leukemia, acute lymphoblastic leukemia (ALL), acute myeloid leukemia (AML), acute or chronic bacterial infection, acute pancreatitis, acute renal failure, adenocarcinomas, aerial ectopic beats, AIDS dementia complex, alcohol-induced hepatitis, allergic conjunctivitis, allergic contact dermatitis, allergic rhinitis, allograft rejection, alpha-1-antitrypsin deficiency, amyotrophic lateral sclerosis, anemia, angina pectoris, anterior horn cell degeneration, anti cd3 therapy, antiphospholipid syndrome, anti-receptor hypersensitivity reactions, aordic and peripheral aneuryisms, aortic dissection, arterial hypertension, arteriosclerosis, arteriovenous fistula, ataxia, atrial fibrillation (sustained or paroxysmal), atrial flutter, atrioventricular block, B cell lymphoma, bone graft rejection, bone marrow transplant (BMT) rejection, bundle branch block, Burkitt's lymphoma, Burns, cardiac arrhythmias, cardiac stun syndrome, cardiac tumors, cardiomyopathy, cardiopulmonary bypass inflammation response, cartilage transplant rejection, cerebellar cortical degenerations, cerebellar disorders, chaotic or multifocal atrial tachycardia, chemotherapy associated disorders, chromic myelocytic leukemia (CML), chronic alcoholism, chronic inflammatory pathologies, chronic lymphocytic leukemia (CLL), chronic obstructive pulmonary disease (COPD), chronic salicylate intoxication, colorectal carcinoma, congestive heart failure, conjunctivitis, contact dermatitis, cor pulmonale, coronary artery disease, Creutzfeldt-Jakob disease, culture negative sepsis, cystic fibrosis, cytokine therapy associated disorders, Dementia pugilistica, demyelinating diseases, dengue hemorrhagic fever, dermatitis, dermatologic conditions, diabetes, diabetes mellitus, diabetic ateriosclerotic disease, Diffuse Lewy body disease, dilated congestive cardiomyopathy, disorders of the basal ganglia, Down's Syndrome in middle age, drug-induced movement disorders induced by drugs which block CNS dopamine receptors, drug sensitivity, eczema, encephalomyelitis, endocarditis, endocrinopathy, epiglottitis, epstein-barr virus infection, erythromelalgia, extrapyramidal and cerebellar disorders, familial hematophagocytic lymphohistiocytosis, fetal thymus implant rejection, Friedreich's ataxia, functional peripheral arterial disorders, fungal sepsis, gas gangrene, gastric ulcer, glomerular nephritis, graft rejection of any organ or tissue, gram negative sepsis, gram positive sepsis, granulomas due to intracellular organisms, hairy cell leukemia, Hallerrorden-Spatz disease, hashimoto's thyroiditis, hay fever, heart transplant rejection, hemachromatosis, hemodialysis, hemolytic uremic syndrome/thrombolytic thrombocytopenic purpura, hemorrhage, hepatitis (A), His bundle arrythmias, HIV infection/HIV neuropathy, Hodgkin's disease, hyperkinetic movement disorders, hypersensitity reactions, hypersensitivity pneumonitis, hypertension, hypokinetic movement disorders, hypothalamic-pituitary-adrenal axis evaluation, idiopathic Addison's disease, idiopathic pulmonary fibrosis, antibody mediated cytotoxicity, Asthenia, infantile spinal muscular atrophy, inflammation of the aorta, influenza a, ionizing radiation exposure, iridocyclitis/uveitis/optic neuritis, ischemia-reperfusion injury, ischemic stroke, juvenile rheumatoid arthritis, juvenile spinal muscular atrophy, Kaposi's sarcoma, kidney transplant rejection, legionella, leishmaniasis, leprosy, lesions of the corticospinal system, lipedema, liver transplant rejection, lymphederma, malaria, malignamt Lymphoma, malignant histiocytosis, malignant melanoma, meningitis, meningococcemia, metabolic/idiopathic, migraine headache, mitochondrial multi.system disorder, mixed connective tissue disease, monoclonal gammopathy, multiple myeloma, multiple systems degenerations (Mencel Dejerine-Thomas Shi-Drager and Machado-Joseph), myasthenia gravis, mycobacterium avium intracellulare, mycobacterium tuberculosis, myelodyplastic syndrome, myocardial infarction, myocardial ischemic disorders, nasopharyngeal carcinoma, neonatal chronic lung disease, nephritis, nephrosis, neurodegenerative diseases, neurogenic I muscular atrophies, neutropenic fever, non-hodgkins lymphoma, occlusion of the abdominal aorta and its branches, occulsive arterial disorders, okt3 therapy, orchitis/epidydimitis, orchitis/vasectomy reversal procedures, organomegaly, osteoporosis, pancreas transplant rejection, pancreatic carcinoma, paraneoplastic syndrome/hypercalcemia of malignancy, parathyroid transplant rejection, pelvic inflammatory disease, perennial rhinitis, pericardial disease, peripheral atherlosclerotic disease, peripheral vascular disorders, peritonitis, pernicious anemia, pneumocystis carinii pneumonia, pneumonia, POEMS syndrome (polyneuropathy, organomegaly, endocrinopathy, monoclonal gammopathy, and skin changes syndrome), post perfusion syndrome, post pump syndrome, post-MI cardiotomy syndrome, preeclampsia, Progressive supranucleo Palsy, primary pulmonary hypertension, radiation therapy, Raynaud's phenomenon and disease, Raynoud's disease, Refsum's disease, regular narrow QRS tachycardia, renovascular hypertension, reperfusion injury, restrictive cardiomyopathy, sarcomas, scleroderma, senile chorea, Senile Dementia of Lewy body type, seronegative arthropathies, shock, sickle cell anemia, skin allograft rejection, skin changes syndrome, small bowel transplant rejection, solid tumors, specific arrythmias, spinal ataxia, spinocerebellar degenerations, streptococcal myositis, structural lesions of the cerebellum, Subacute sclerosing panencephalitis, Syncope, syphilis of the cardiovascular system, systemic anaphalaxis, systemic inflammatory response syndrome, systemic onset juvenile rheumatoid arthritis, T-cell or FAB ALL, Telangiectasia, thromboangitis obliterans, thrombocytopenia, toxicity, transplants, trauma/hemorrhage, type III hypersensitivity reactions, type IV hypersensitivity, unstable angina, uremia, urosepsis, urticaria, valvular heart diseases, varicose veins, vasculitis, venous diseases, venous thrombosis, ventricular fibrillation, viral and fungal infections, vital encephalitis/aseptic meningitis, vital-associated hemaphagocytic syndrome, Wernicke-Korsakoff syndrome, Wilson's disease, xenograft rejection of any organ or tissue. (see Peritt et al. PCT publication No. WO2002097048A2, Leonard et al., PCT publication No. WO9524918 A1, and Salfeld et al., PCT publication No. WO00/56772A1).

[0295] The DVD-Igs provided herein may also treat one or more of the following diseases: Acute coronary syndromes, Acute Idiopathic Polyneuritis, Acute Inflammatory Demyelinating Polyradiculoneuropathy, Acute ischemia, Adult Still's Disease, Alopecia greata, Anaphylaxis, Anti-Phospholipid Antibody Syndrome, Aplastic anemia, Arteriosclerosis, Atopic eczema, Atopic dermatitis, Autoimmune dermatitis, Autoimmune disorder associated with Streptococcus infection, Autoimmune hearingloss, Autoimmune Lymphoproliferative Syndrome (ALPS), Autoimmune myocarditis, autoimmune thrombocytopenia (A1TP), Blepharitis, Bronchiectasis, Bullous pemphigoid, Cardiovascular Disease, Catastrophic Antiphospholipid Syndrome, Celiac Disease, Cervical Spondylosis, Chronic ischemia, Cicatricial pemphigoid, Clinically isolated Syndrome (CIS) with Risk for Multiple Sclerosis, Conjunctivitis, Childhood Onset Psychiatric Disorder, Chronic obstructive pulmonary disease (COPD), Dacryocystitis, dermatomyositis, Diabetic retinopathy, Diabetes mellitus, Disk herniation, Disk prolaps, Drug induced immune hemolytic anemia, Endocarditis, Endometriosis, endophthalmitis, Episcleritis, Erythema multiforme, erythema multiforme major, Gestational pemphigoid, Guillain-Barré Syndrome (GBS), Hay Fever, Hughes Syndrome, Idiopathic Parkinson's Disease, idiopathic interstitial pneumonia, IgE-mediated Allergy, Immune hemolytic anemia, Inclusion Body Myositis, Infectious ocular inflammatory disease, Inflammatory demyelinating disease, Inflammatory heart disease, Inflammatory kidney disease, IPF/UIP, Iritis, Keratitis, Keratojuntivitis sicca, Kussmaul disease or Kussmaul-Meier Disease, Landry's Paralysis, Langerhan's Cell Histiocytosis, Livedo reticularis, Macular Degeneration, malignancies, Microscopic Polyangiitis, Morbus Bechterev, Motor Neuron Disorders, Mucous membrane pemphigoid, Multiple Organ failure, Myasthenia Gravis, Myelodysplastic Syndrome, Myocarditis, Nerve Root Disorders, Neuropathy, Non-A Non-B Hepatitis, Optic Neuritis, Osteolysis, Ovarian cancer, Pauciarticular JRA, peripheral artery occlusive disease (PAOD), peripheral vascular disease (PVD), peripheral artery disease (PAD), Phlebitis, Polyarteritis nodosa (or periarteritis nodosa), Polychondritis, Polymyalgia Rheumatica, Poliosis, Polyarticular JRA, Polyendocrine Deficiency Syndrome, Polymyositis, polymyalgia rheumatica (PMR), Post-Pump Syndrome, primary parkinsonism, prostate and rectal cancer and hematopoietic malignancies (leukemia and lymphoma), Prostatitis, Pure red cell aplasia, Primary Adrenal Insufficiency, Recurrent Neuromyelitis Optica, Restenosis, Rheumatic heart disease, SAPHO (synovitis, acne, pustulosis, hyperostosis, and osteitis), Scleroderma, Secondary Amyloidosis, Shock lung, Scleritis, Sciatica, Secondary Adrenal Insufficiency, Silicone associated connective tissue disease, Sneddon-Wilkinson Dermatosis, spondilitis ankylosans, Stevens-Johnson Syndrome (SJS), Systemic inflammatory response syndrome, Temporal arteritis, toxoplasmic retinitis, toxic epidermal necrolysis, Transverse myelitis, TRAPS (Tumor Necrosis Factor Receptor, Type 1 allergic reaction, Type II Diabetes, Urticaria, Usual interstitial pneumonia (UIP), Vasculitis, Vernal conjunctivitis, viral retinitis, Vogt-Koyanagi-Harada syndrome (VKH syndrome), Wet macular degeneration, and Wound healing.

[0296] The binding proteins provided herein can be used to treat humans suffering from autoimmune diseases, in particular those associated with inflammation, including, rheumatoid arthritis, spondylitis, allergy, autoimmune diabetes, autoimmune uveitis. In an embodiment, the binding proteins provided herein or antigen-binding portions thereof, are used to treat rheumatoid arthritis, Crohn's disease, multiple sclerosis, insulin dependent diabetes mellitus and psoriasis.

[0297] In an embodiment, diseases that can be treated or diagnosed with the compositions and methods provided herein include, but are not limited to, primary and metastatic cancers, including carcinomas of breast, colon, rectum, lung, oropharynx, hypopharynx, esophagus, stomach, pancreas, liver, gallbladder and bile ducts, small intestine, urinary tract (including kidney, bladder and urothelium), female genital tract (including cervix, uterus, and ovaries as well as choriocarcinoma and gestational trophoblastic disease), male genital tract (including prostate, seminal vesicles, testes and germ cell tumors), endocrine glands (including the thyroid, adrenal, and pituitary glands), and skin, as well as hemangiomas, melanomas, sarcomas (including those arising from bone and soft tissues as well as Kaposi's sarcoma), tumors of the brain, nerves, eyes, and meninges (including astrocytomas, gliomas, glioblastomas, retinoblastomas, neuromas, neuroblastomas, Schwannomas, and meningiomas), solid tumors arising from hematopoietic malignancies such as leukemias, and lymphomas (both Hodgkin's and non-Hodgkin's lymphomas).

[0298] In an embodiment, the antibodies provided herein or antigen-binding portions thereof, are used to treat cancer or in the prevention of metastases from the tumors described herein either when used alone or in combination with radiotherapy and/or other chemotherapeutic agents.

[0299] The antibodies provided herein, or antigen binding portions thereof, may be combined with agents that include but are not limited to, antineoplastic agents, radiotherapy, chemotherapy such as DNA alkylating agents, cisplatin, carboplatin, anti-tubulin agents, paclitaxel, docetaxel, taxol, doxorubicin, gemcitabine, gemzar, anthracyclines, adriamycin, topoisomerase I inhibitors, topoisomerase II inhibitors, 5-fluorouracil (5-FU), leucovorin, irinotecan, receptor tyrosine kinase inhibitors (e.g., erlotinib, gefitinib), COX-2 inhibitors (e.g., celecoxib), kinase inhibitors, and siRNAs.

[0300] A binding protein provided herein also can be administered with one or more additional therapeutic agents useful in the treatment of various diseases.

[0301] A binding protein provided herein can be used alone or in combination to treat such diseases. It should be understood that the binding proteins can be used alone or in combination with an additional agent, e.g., a therapeutic agent, said additional agent being selected by the skilled artisan for its intended purpose. For example, the additional agent can be a therapeutic agent art-recognized as being useful to treat the disease or condition being treated by the antibody provided herein. The additional agent also can be an agent that imparts a beneficial attribute to the therapeutic composition e.g., an agent which effects the viscosity of the composition.

[0302] It should further be understood that the combinations provided herein are those combinations useful for their intended purpose. The agents set forth below are illustrative for purposes and not intended to be limited. In some embodiments, the combinations comprise the antibodies provided herein and at least one additional agent selected from the lists below. The combination can also include more than one additional agent, e.g., two or three additional agents if the combination is such that the formed composition can perform its intended function.

[0303] Combinations to treat autoimmune and inflammatory diseases are non-steroidal anti-inflammatory drug(s) also referred to as NSAIDS which include drugs like ibuprofen. Other combinations are corticosteroids including prednisolone; the well known side-effects of steroid use can be reduced or even eliminated by tapering the steroid dose required when treating patients in combination with the DVD Igs provided herein. Non-limiting examples of therapeutic agents for rheumatoid arthritis with which an antibody provided herein, or antibody portion thereof, can be combined include the following: cytokine suppressive anti-inflammatory drug(s) (CSAIDs); antibodies to or antagonists of other human cytokines or growth factors, for example, TNF, LT, IL-1, IL-2, IL-3, IL-4, IL-5, IL-6, IL-7, IL-8, IL-15, IL-16, IL-18, IL-21, IL-23, interferons, EMAP-IL GM-CSF, FGF, and PDGF. Binding proteins provided herein, or antigen binding portions thereof, can be combined with antibodies to cell surface molecules such as CD2, CD3, CD4, CD8, CD25, CD28, CD30, CD40, CD45, CD69, CD80 (B7.1), CD86 (B7.2), CD90, CTLA or their ligands including CD154 (gp39 or CD40L).

[0304] Combinations of therapeutic agents may interfere at different points in the autoimmune and subsequent inflammatory cascade; examples include TNF antagonists like chimeric, humanized or human TNF antibodies, Adalimumab, (PCT Publication No. WO 97/29131), CA2 (Remicade™), CDP 571, and soluble p55 or p75 TNF receptors, derivatives, thereof, (p75TNFR1gG (Enbrel) or p55TNFR1gG (Lenercept), and also TNFα converting enzyme (TACE) inhibitors; similarly IL-1 inhibitors (Interleukin-1-converting enzyme inhibitors, IL-1RA etc.) may be effective for the same reason. Other combinations include Interleukin 11. Yet another combination include key players of the autoimmune response which may act parallel to, dependent on or in concert with IL-12 function; especially are IL-18 antagonists including IL-18 antibodies or soluble IL-18 receptors, or IL-18 binding proteins. It has been shown that IL-12 and IL-18 have overlapping but distinct functions and a combination of antagonists to both may be most effective. Yet another combination are non-depleting anti-CD4 inhibitors. Yet other combinations include antagonists of the co-stimulatory pathway CD80 (B7.1) or CD86 (B7.2) including antibodies, soluble receptors or antagonistic ligands.

[0305] The binding proteins provided herein may also be combined with agents, such as methotrexate, 6-MP, azathioprine sulphasalazine, mesalazine, olsalazine chloroquinine/hydroxychloroquine, pencillamine, aurothiomalate (intramuscular and oral), azathioprine, cochicine, corticosteroids (oral, inhaled and local injection), beta-2 adrenoreceptor agonists (salbutamol, terbutaline, salmeteral), xanthines (theophylline, aminophylline), cromoglycate, nedocromil, ketotifen, ipratropium and oxitropium, cyclosporin, FK506, rapamycin, mycophenolate mofetil, leflunomide, NSAIDs, for example, ibuprofen, corticosteroids such as prednisolone, phosphodiesterase inhibitors, adensosine agonists, antithrombotic agents, complement inhibitors, adrenergic agents, agents which interfere with signalling by proinflammatory cytokines such as TNF-α or IL-1 (e.g., IRAK, NIK, IKK, p38 or MAP kinase inhibitors), IL-1β converting enzyme inhibitors, TNFα converting enzyme (TACE) inhibitors, T-cell signalling inhibitors such as kinase inhibitors, metalloproteinase inhibitors, sulfasalazine, azathioprine, 6-mercaptopurines, angiotensin converting enzyme inhibitors, soluble cytokine receptors and derivatives thereof (e.g., soluble p55 or p75 TNF receptors and the derivatives p75TNFRIgG (Enbrel and p55TNFRIgG (Lenercept)), sIL 1R1, sIL 1R11, sIL-6R), antiinflammatory cytokines (e.g., IL-4, IL-10, IL-11, IL-13 and TGFβ), celecoxib, folic acid, hydroxychloroquine sulfate, rofecoxib, etanercept, infliximab, naproxen, valdecoxib, sulfasalazine, methylprednisolone, meloxicam, methylprednisolone acetate, gold sodium thiomalate, aspirin, triamcinolone acetonide, propoxyphene napsylate/apap, folate, nabumetone, diclofenac, piroxicam, etodolac, diclofenac sodium, oxaprozin, oxycodone hcl, hydrocodone bitartrate/apap, diclofenac sodium/misoprostol, fentanyl, anakinra, human recombinant, tramadol hcl, salsalate, sulindac, cyanocobalamin/fa/pyridoxine, acetaminophen, alendronate sodium, prednisolone, morphine sulfate, lidocaine hydrochloride, indomethacin, glucosamine sulf/chondroitin, amitriptyline hcl, sulfadiazine, oxycodone hcl/acetaminophen, olopatadine hcl, misoprostol, naproxen sodium, omeprazole, cyclophosphamide, rituximab, IL-1 TRAP, MRA, CTLA4-IG, IL-18 BP, anti-IL-18, Anti-IL15, BIRB-796, SCIO-469, VX-702, AMG-548, VX-740, Roflumilast, IC-485, CDC-801, and Mesopram. Combinations include methotrexate or leflunomide and in moderate or severe rheumatoid arthritis cases, cyclosporine.

[0306] Nonlimiting additional agents which can also be used in combination with a binding protein to treat rheumatoid arthritis include, but are not limited to, the following: non-steroidal anti-inflammatory drug(s) (NSAIDs); cytokine suppressive anti-inflammatory drug(s) (CSA/Ds); CDP-571/BAY-10-3356 (humanized anti-TNFα antibody; Celltech/Bayer); cA2/infliximab (chimeric anti-TNFα antibody; Centocor); 75 kdTNFR-IgG/etanercept (75 kD TNF receptor-IgG fusion protein; Immunex; see e.g., Arthritis & Rheumatism (1994) Vol. 37, S295; J. Invest. Med. (1996) Vol. 44, 235A); 55 kdTNF-IgG (55 kD TNF receptor-IgG fusion protein; Hoffmann-LaRoche); IDEC-CE9.1/SB 210396 (non-depleting primatized anti-CD4 antibody; IDEC/SmithKline; see e.g., Arthritis & Rheumatism (1995) Vol. 38, S185); DAB 486-IL-2 and/or DAB 389-IL-2 (IL-2 fusion proteins; Seragen; see e.g., Arthritis & Rheumatism (1993) Vol. 36, 1223); Anti-Tac (humanized anti-IL-2Rα; Protein Design Labs/Roche); IL-4 (anti-inflammatory cytokine; DNAX/Schering); IL-10 (SCH 52000; recombinant IL-10, anti-inflammatory cytokine; DNAX/Schering); IL-4; IL-10 and/or IL-4 agonists (e.g., agonist antibodies); IL-1RA (IL-1 receptor antagonist; Synergen/Amgen); anakinra (Kineret®/Amgen); TNF-bp/s-TNF (soluble TNF binding protein; see e.g., Arthritis & Rheumatism (1996) Vol. 39, No. 9 (supplement), S284; Amer. J. Physiol.-Heart and Circulatory Physiology (1995) Vol. 268, pp. 37-42); R973401 (phosphodiesterase Type N inhibitor; see e.g., Arthritis & Rheumatism (1996) Vol. 39, No. 9 (supplement), S282); MK-966 (COX-2 Inhibitor; see e.g., Arthritis & Rheumatism (1996) Vol. 39, No. 9 (supplement), S81); Iloprost (see e.g., Arthritis & Rheumatism (1996) Vol. 39, No. 9 (supplement), S82); methotrexate; thalidomide (see e.g., Arthritis & Rheumatism (1996) Vol. 39, No. 9 (supplement), S282) and thalidomide-related drugs (e.g., Celgen); leflunomide (anti-inflammatory and cytokine inhibitor; see e.g., Arthritis & Rheumatism (1996) Vol. 39, No. 9 (supplement), S131; Inflammation Research (1996) Vol. 45, pp. 103-107); tranexamic acid (inhibitor of plasminogen activation; see e.g., Arthritis & Rheumatism (1996) Vol. 39, No. 9 (supplement), S284); T-614 (cytokine inhibitor; see e.g., Arthritis & Rheumatism (1996) Vol. 39, No. 9 (supplement), S282); prostaglandin E1 (see e.g., Arthritis & Rheumatism (1996) Vol. 39, No. 9 (supplement), S282); Tenidap (non-steroidal anti-inflammatory drug; see e.g., Arthritis & Rheumatism (1996) Vol. 39, No. 9 (supplement), S280); Naproxen (non-steroidal anti-inflammatory drug; see e.g., Neuro Report (1996) Vol. 7, pp. 1209-1213); Meloxicam (non-steroidal anti-inflammatory drug); Ibuprofen (non-steroidal anti-inflammatory drug); Piroxicam (non-steroidal anti-inflammatory drug); Diclofenac (non-steroidal anti-inflammatory drug); Indomethacin (non-steroidal anti-inflammatory drug); Sulfasalazine (see e.g., Arthritis & Rheumatism (1996) Vol. 39, No. 9 (supplement), S281); Azathioprine (see e.g., Arthritis & Rheumatism (1996) Vol. 39, No. 9 (supplement), S281); ICE inhibitor (inhibitor of the enzyme interleukin-1β converting enzyme); zap-70 and/or lck inhibitor (inhibitor of the tyrosine kinase zap-70 or lck); VEGF inhibitor and/or VEGF-R inhibitor (inhibitors of vascular endothelial cell growth factor or vascular endothelial cell growth factor receptor; inhibitors of angiogenesis); corticosteroid anti-inflammatory drugs (e.g., SB203580); TNF-convertase inhibitors; anti-IL-12 antibodies; anti-IL-18 antibodies; interleukin-11 (see e.g., Arthritis & Rheumatism (1996) Vol. 39, No. 9 (supplement), S296); interleukin-13 (see e.g., Arthritis & Rheumatism (1996) Vol. 39, No. 9 (supplement), S308); interleukin-17 inhibitors (see e.g., Arthritis & Rheumatism (1996) Vol. 39, No. 9 (supplement), S120); gold; penicillamine; chloroquine; chlorambucil; hydroxychloroquine; cyclosporine; cyclophosphamide; total lymphoid irradiation; anti-thymocyte globulin; anti-CD4 antibodies; CD5-toxins; orally-administered peptides and collagen; lobenzarit disodium; Cytokine Regulating Agents (CRAs) HP228 and HP466 (Houghten Pharmaceuticals, Inc.); ICAM-1 antisense phosphorothioate oligo-deoxynucleotides (ISIS 2302; Isis Pharmaceuticals, Inc.); soluble complement receptor 1 (TP10; T Cell Sciences, Inc.); prednisone; orgotein; glycosaminoglycan polysulphate; minocycline; anti-IL2R antibodies; marine and botanical lipids (fish and plant seed fatty acids; see e.g., DeLuca et al. (1995) Rheum. Dis. Clin. North Am. 21:759-777); auranofin; phenylbutazone; meclofenamic acid; flufenamic acid; intravenous immune globulin; zileuton; azaribine; mycophenolic acid (RS-61443); tacrolimus (FK-506); sirolimus (rapamycin); amiprilose (therafectin); cladribine (2-chlorodeoxyadenosine); methotrexate; bcl-2 inhibitors (see Bruncko, Milan et al., Journal of Medicinal Chemistry (2007), 50(4), 641-662); antivirals and immune modulating agents.

[0307] In one embodiment, the binding protein or antigen-binding portion thereof, is administered in combination with one of the following agents for the treatment of rheumatoid arthritis: small molecule inhibitor of KDR, small molecule inhibitor of Tie-2; methotrexate; prednisone; celecoxib; folic acid; hydroxychloroquine sulfate; rofecoxib; etanercept; infliximab;

[0308] leflunomide; naproxen; valdecoxib; sulfasalazine; methylprednisolone; ibuprofen; meloxicam; methylprednisolone acetate; gold sodium thiomalate; aspirin; azathioprine; triamcinolone acetonide; propxyphene napsylate/apap; folate; nabumetone; diclofenac; piroxicam; etodolac; diclofenac sodium; oxaprozin; oxycodone hcl; hydrocodone bitartrate/apap; diclofenac sodium/misoprostol; fentanyl; anakinra, human recombinant; tramadol hcl; salsalate; sulindac; cyanocobalamin/fa/pyridoxine; acetaminophen; alendronate sodium; prednisolone; morphine sulfate; lidocaine hydrochloride; indomethacin; glucosamine sulfate/chondroitin; cyclosporine; amitriptyline hcl; sulfadiazine; oxycodone hcl/acetaminophen; olopatadine hcl; misoprostol; naproxen sodium; omeprazole; mycophenolate mofetil; cyclophosphamide; rituximab; IL-1 TRAP; MRA; CTLA4-IG; IL-18 BP; IL-12/23; anti-IL 18; anti-IL 15; BIRB-796; SCIO-469; VX-702; AMG-548; VX-740; Roflumilast; IC-485; CDC-801; and mesopram.

[0309] Non-limiting examples of therapeutic agents for inflammatory bowel disease with which a binding protein provided herein can be combined include the following: budenoside; epidermal growth factor; corticosteroids; cyclosporin, sulfasalazine; aminosalicylates; 6-mercaptopurine; azathioprine; metronidazole; lipoxygenase inhibitors; mesalamine; olsalazine; balsalazide; antioxidants; thromboxane inhibitors; IL-1 receptor antagonists; anti-IL-113 mAbs; anti-IL-6 mAbs; growth factors; elastase inhibitors; pyridinyl-imidazole compounds; antibodies to or antagonists of other human cytokines or growth factors, for example, TNF, LT, IL-1, IL-2, IL-6, IL-7, IL-8, IL-15, IL-16, IL-17, IL-18, EMAP-II, GM-CSF, FGF, and PDGF. Antibodies provided herein, or antigen binding portions thereof, can be combined with antibodies to cell surface molecules such as CD2, CD3, CD4, CD8, CD25, CD28, CD30, CD40, CD45, CD69, CD90 or their ligands. The antibodies provided herein, or antigen binding portions thereof, may also be combined with agents, such as methotrexate, cyclosporin, FK506, rapamycin, mycophenolate mofetil, leflunomide, NSAIDs, for example, ibuprofen, corticosteroids such as prednisolone, phosphodiesterase inhibitors, adenosine agonists, antithrombotic agents, complement inhibitors, adrenergic agents, agents which interfere with signalling by proinflammatory cytokines such as TNFα or IL-1 (e.g., IRAK, NIK, IKK, p38 or MAP kinase inhibitors), IL-113 converting enzyme inhibitors, TNFα converting enzyme inhibitors, T-cell signalling inhibitors such as kinase inhibitors, metalloproteinase inhibitors, sulfasalazine, azathioprine, 6-mercaptopurines, angiotensin converting enzyme inhibitors, soluble cytokine receptors and derivatives thereof (e.g., soluble p55 or p75 TNF receptors, sIL-1R1, sIL-6R) and antiinflammatory cytokines (e.g., IL-4, IL-10, IL-11, IL-13 and TGFβ) and bcl-2 inhibitors.

[0310] Examples of therapeutic agents for Crohn's disease in which a binding protein can be combined include the following: TNF antagonists, for example, anti-TNF antibodies, Adalimumab (PCT Publication No. WO 97/29131; HUMIRA), CA2 (REMICADE), CDP 571, TNFR-Ig constructs, (p75TNFRIgG (ENBREL) and p55TNFRIgG (LENERCEPT)) inhibitors and PDE4 inhibitors. Antibodies provided herein, or antigen binding portions thereof, can be combined with corticosteroids, for example, budenoside and dexamethasone. Binding proteins provided herein or antigen binding portions thereof, may also be combined with agents such as sulfasalazine, 5-aminosalicylic acid and olsalazine, and agents which interfere with synthesis or action of proinflammatory cytokines such as IL-1, for example, IL-113 converting enzyme inhibitors and IL-1ra. Antibodies provided herein or antigen binding portion thereof may also be used with T cell signaling inhibitors, for example, tyrosine kinase inhibitors 6-mercaptopurines. Binding proteins provided herein, or antigen binding portions thereof, can be combined with IL-11. Binding proteins provided herein, or antigen binding portions thereof, can be combined with mesalamine, prednisone, azathioprine, mercaptopurine, infliximab, methylprednisolone sodium succinate, diphenoxylate/atrop sulfate, loperamide hydrochloride, methotrexate, omeprazole, folate, ciprofloxacin/dextrose-water, hydrocodone bitartrate/apap, tetracycline hydrochloride, fluocinonide, metronidazole, thimerosal/boric acid, cholestyramine/sucrose, ciprofloxacin hydrochloride, hyoscyamine sulfate, meperidine hydrochloride, midazolam hydrochloride, oxycodone hcl/acetaminophen, promethazine hydrochloride, sodium phosphate, sulfamethoxazole/trimethoprim, celecoxib, polycarbophil, propoxyphene napsylate, hydrocortisone, multivitamins, balsalazide disodium, codeine phosphate/apap, colesevelam hcl, cyanocobalamin, folic acid, levofloxacin, methylprednisolone, natalizumab and interferon-gamma

[0311] Non-limiting examples of therapeutic agents for multiple sclerosis with which binding proteins provided herein can be combined include the following: corticosteroids; prednisolone; methylprednisolone; azathioprine; cyclophosphamide; cyclosporine; methotrexate; 4-aminopyridine; tizanidine; interferon-β1a (AVONEX; Biogen); interferon-β1b (BETASERON; Chiron/Berlex); interferon a-n3) (Interferon Sciences/Fujimoto), interferon-α (Alfa Wassermann/J&J), interferon β1A-IF (Serono/Inhale Therapeutics), Peginterferon α2b (Enzon/Schering-Plough), Copolymer 1 (Cop-1; COPAXONE; Teva Pharmaceutical Industries, Inc.); hyperbaric oxygen; intravenous immunoglobulin; clabribine; antibodies to or antagonists of other human cytokines or growth factors and their receptors, for example, TNF, LT, IL-1, IL-2, IL-6, IL-7, IL-8, IL-23, IL-15, IL-16, IL-18, GM-CSF, FGF, and PDGF. Binding proteins orovided herein can be combined with antibodies to cell surface molecules such as CD2, CD3, CD4, CD8, CD19, CD20, CD25, CD28, CD30, CD40, CD45, CD69, CD80, CD86, CD90 or their ligands. Binding proteins provided herein, may also be combined with agents, such as methotrexate, cyclosporine, FK506, rapamycin, mycophenolate mofetil, leflunomide, NSA1Ds, for example, ibuprofen, corticosteroids such as prednisolone, phosphodiesterase inhibitors, adensosine agonists, antithrombotic agents, complement inhibitors, adrenergic agents, agents which interfere with signalling by proinflammatory cytokines such as TNFα or IL-1 (e.g., IRAK, NIK, IKK, p38 or MAP kinase inhibitors), IL-1β converting enzyme inhibitors, TACE inhibitors, T-cell signaling inhibitors such as kinase inhibitors, metalloproteinase inhibitors, sulfasalazine, azathioprine, 6-mercaptopurines, angiotensin converting enzyme inhibitors, soluble cytokine receptors and derivatives thereof (e.g., soluble p55 or p75 TNF receptors, sIL-1R1, sIL-1R11, sIL-6R), antiinflammatory cytokines (e.g., IL-4, IL-10, IL-13 and TGFβ) and bcl-2 inhibitors.

[0312] Examples of therapeutic agents for multiple sclerosis in which binding proteins provided herein can be combined include interferon-β, for example, IFNβ1a and IFNβ1b; copaxone, corticosteroids, caspase inhibitors, for example inhibitors of caspase-1, IL-1 inhibitors, TNF inhibitors, and antibodies to CD40 ligand and CD80.

[0313] The binding proteins provided herein, may also be combined with agents, such as alemtuzumab, dronabinol, Unimed, daclizumab, mitoxantrone, xaliproden hydrochloride, fampridine, glatiramer acetate, natalizumab, sinnabidol, a-immunokine NNSO3, ABR-215062, AnergiX.MS, chemokine receptor antagonists, BBR-2778, calagualine, CPI-1189, LEM (liposome encapsulated mitoxantrone), THC.CBD (cannabinoid agonist) MBP-8298, mesopram (PDE4 inhibitor), MNA-715, anti-IL-6 receptor antibody, neurovax, pirfenidone allotrap 1258 (RDP-1258), sTNE-R1, talampanel, teriflunomide, TGF-beta2, tiplimotide, VLA-4 antagonists (for example, TR-14035, VLA4 Ultrahaler, Antegran-ELAN/Biogen), interferon gamma antagonists, IL-4 agonists.

[0314] Non-limiting examples of therapeutic agents for Angina with which binding proteins provided herein can be combined include the following: aspirin, nitroglycerin, isosorbide mononitrate, metoprolol succinate, atenolol, metoprolol tartrate, amlodipine besylate, diltiazem hydrochloride, isosorbide dinitrate, clopidogrel bisulfate, nifedipine, atorvastatin calcium, potassium chloride, furosemide, simvastatin, verapamil hcl, digoxin, propranolol hydrochloride, carvedilol, lisinopril, spironolactone, hydrochlorothiazide, enalapril maleate, nadolol, ramipril, enoxaparin sodium, heparin sodium, valsartan, sotalol hydrochloride, fenofibrate, ezetimibe, bumetanide, losartan potassium, lisinopril/hydrochlorothiazide, felodipine, captopril, bisoprolol fumarate.

[0315] Non-limiting examples of therapeutic agents for Ankylosing Spondylitis with which binding proteins provided herein can be combined include the following: ibuprofen, diclofenac and misoprostol, naproxen, meloxicam, indomethacin, diclofenac, celecoxib, rofecoxib, Sulfasalazine, Methotrexate, azathioprine, minocyclin, prednisone, etanercept, infliximab.

[0316] Non-limiting examples of therapeutic agents for Asthma with which binding proteins provided herein can be combined include the following: albuterol, salmeterol/fluticasone, montelukast sodium, fluticasone propionate, budesonide, prednisone, salmeterol xinafoate, levalbuterol hcl, albuterol sulfate/ipratropium, prednisolone sodium phosphate, triamcinolone acetonide, beclomethasone dipropionate, ipratropium bromide, azithromycin, pirbuterol acetate, prednisolone, theophylline anhydrous, methylprednisolone sodium succinate, clarithromycin, zafirlukast, formoterol fumarate, influenza virus vaccine, methylprednisolone, amoxicillin trihydrate, flunisolide, allergy injection, cromolyn sodium, fexofenadine hydrochloride, flunisolide/menthol, amoxicillin/clavulanate, levofloxacin, inhaler assist device, guaifenesin, dexamethasone sodium phosphate, moxifloxacin hcl, doxycycline hyclate, guaifenesin/d-methorphan, p-ephedrine/cod/chlorphenir, gatifloxacin, cetirizine hydrochloride, mometasone furoate, salmeterol xinafoate, benzonatate, cephalexin, pe/hydrocodone/chlorphenir, cetirizine hcl/pseudoephed, phenylephrine/cod/promethazine, codeine/promethazine, cefprozil, dexamethasone, guaifenesin/pseudoephedrine, chlorpheniramine/hydrocodone, nedocromil sodium, terbutaline sulfate, epinephrine, methylprednisolone, metaproterenol sulfate.

[0317] Non-limiting examples of therapeutic agents for COPD with which binding proteins provided herein can be combined include the following: albuterol sulfate/ipratropium, ipratropium bromide, salmeterol/fluticasone, albuterol, salmeterol xinafoate, fluticasone propionate, prednisone, theophylline anhydrous, methylprednisolone sodium succinate, montelukast sodium, budesonide, formoterol fumarate, triamcinolone acetonide, levofloxacin, guaifenesin, azithromycin, beclomethasone dipropionate, levalbuterol hcl, flunisolide, ceftriaxone sodium, amoxicillin trihydrate, gatifloxacin, zafirlukast, amoxicillin/clavulanate, flunisolide/menthol, chlorpheniramine/hydrocodone, metaproterenol sulfate, methylprednisolone, mometasone furoate, p-ephedrine/cod/chlorphenir, pirbuterol acetate, p-ephedrine/loratadine, terbutaline sulfate, tiotropium bromide, (R,R)-formoterol, TgAAT, Cilomilast, Roflumilast.

[0318] Non-limiting examples of therapeutic agents for HCV with which binding proteins provided herein can be combined include the following: Interferon-alpha-2a, Interferon-alpha-2b, Interferon-alpha con1, Interferon-alpha-n1, Pegylated interferon-alpha-2a, Pegylated interferon-alpha-2b, ribavirin, Peginterferon alfa-2b+ribavirin, Ursodeoxycholic Acid, Glycyrrhizic Acid, Thymalfasin, Maxamine, VX-497 and any compounds that are used to treat HCV through intervention with the following targets: HCV polymerase, HCV protease, HCV helicase, HCV IRES (internal ribosome entry site).

[0319] Non-limiting examples of therapeutic agents for Idiopathic Pulmonary Fibrosis with which binding proteins provided herein can be combined include the following: prednisone, azathioprine, albuterol, colchicine, albuterol sulfate, digoxin, gamma interferon, methylprednisolone sod succ, lorazepam, furosemide, lisinopril, nitroglycerin, spironolactone, cyclophosphamide, ipratropium bromide, actinomycin d, alteplase, fluticasone propionate, levofloxacin, metaproterenol sulfate, morphine sulfate, oxycodone hcl, potassium chloride, triamcinolone acetonide, tacrolimus anhydrous, calcium, interferon-alpha, methotrexate, mycophenolate mofetil, Interferon-gamma-1β.

[0320] Non-limiting examples of therapeutic agents for Myocardial Infarction with which binding proteins provided herein can be combined include the following: aspirin, nitroglycerin, metoprolol tartrate, enoxaparin sodium, heparin sodium, clopidogrel bisulfate, carvedilol, atenolol, morphine sulfate, metoprolol succinate, warfarin sodium, lisinopril, isosorbide mononitrate, digoxin, furosemide, simvastatin, ramipril, tenecteplase, enalapril maleate, torsemide, retavase, losartan potassium, quinapril hcl/mag carb, bumetanide, alteplase, enalaprilat, amiodarone hydrochloride, tirofiban hcl m-hydrate, diltiazem hydrochloride, captopril, irbesartan, valsartan, propranolol hydrochloride, fosinopril sodium, lidocaine hydrochloride, eptifibatide, cefazolin sodium, atropine sulfate, aminocaproic acid, spironolactone, interferon, sotalol hydrochloride, potassium chloride, docusate sodium, dobutamine hcl, alprazolam, pravastatin sodium, atorvastatin calcium, midazolam hydrochloride, meperidine hydrochloride, isosorbide dinitrate, epinephrine, dopamine hydrochloride, bivalirudin, rosuvastatin, ezetimibe/simvastatin, avasimibe, cariporide.

[0321] Non-limiting examples of therapeutic agents for Psoriasis with which binding proteins provided herein can be combined include the following: small molecule inhibitor of KDR, small molecule inhibitor of Tie-2, calcipotriene, clobetasol propionate, triamcinolone acetonide, halobetasol propionate, tazarotene, methotrexate, fluocinonide, betamethasone diprop augmented, fluocinolone acetonide, acitretin, tar shampoo, betamethasone valerate, mometasone furoate, ketoconazole, pramoxine/fluocinolone, hydrocortisone valerate, flurandrenolide, urea, betamethasone, clobetasol propionate/emoll, fluticasone propionate, azithromycin, hydrocortisone, moisturizing formula, folic acid, desonide, pimecrolimus, coal tar, diflorasone diacetate, etanercept folate, lactic acid, methoxsalen, hc/bismuth subgal/znoyJresor, methylprednisolone acetate, prednisone, sunscreen, halcinonide, salicylic acid, anthralin, clocortolone pivalate, coal extract, coal tar/salicylic acid, coal tar/salicylic acid/sulfur, desoximetasone, diazepam, emollient, fluocinonide/emollient, mineral oil/castor oil/na lact, mineral oil/peanut oil, petroleum/isopropyl myristate, psoralen, salicylic acid, soap/tribromsalan, thimerosal/boric acid, celecoxib, infliximab, cyclosporine, alefacept, efalizumab, tacrolimus, pimecrolimus, PUVA, UVB, sulfasalazine.

[0322] Non-limiting examples of therapeutic agents for Psoriatic Arthritis with which binding proteins provided herein can be combined include the following: methotrexate, etanercept, rofecoxib, celecoxib, folic acid, sulfasalazine, naproxen, leflunomide, methylprednisolone acetate, indomethacin, hydroxychloroquine sulfate, prednisone, sulindac, betamethasone diprop augmented, infliximab, methotrexate, folate, triamcinolone acetonide, diclofenac, dimethylsulfoxide, piroxicam, diclofenac sodium, ketoprofen, meloxicam, methylprednisolone, nabumetone, tolmetin sodium, calcipotriene, cyclosporine, diclofenac sodium/misoprostol, fluocinonide, glucosamine sulfate, gold sodium thiomalate, hydrocodone bitartrate/apap, ibuprofen, risedronate sodium, sulfadiazine, thioguanine, valdecoxib, alefacept, efalizumab and bcl-2 inhibitors.

[0323] Non-limiting examples of therapeutic agents for Restenosis with which binding proteins provided herein can be combined include the following: sirolimus, paclitaxel, everolimus, tacrolimus, Zotarolimus, acetaminophen.

[0324] Non-limiting examples of therapeutic agents for Sciatica with which binding proteins provided herein can be combined include the following: hydrocodone bitartrate/apap, rofecoxib, cyclobenzaprine hcl, methylprednisolone, naproxen, ibuprofen, oxycodone hcl/acetaminophen, celecoxib, valdecoxib, methylprednisolone acetate, prednisone, codeine phosphate/apap, tramadol hcl/acetaminophen, metaxalone, meloxicam, methocarbamol, lidocaine hydrochloride, diclofenac sodium, gabapentin, dexamethasone, carisoprodol, ketorolac tromethamine, indomethacin, acetaminophen, diazepam, nabumetone, oxycodone hcl, tizanidine hcl, diclofenac sodium/misoprostol, propoxyphene napsylate/apap, asa/oxycod/oxycodone ter, ibuprofen/hydrocodone bit, tramadol hcl, etodolac, propoxyphene hcl, amitriptyline hcl, carisoprodol/codeine phos/asa, morphine sulfate, multivitamins, naproxen sodium, orphenadrine citrate, temazepam.

[0325] Examples of therapeutic agents for SLE (Lupus) in which binding proteins provided herein can be combined include the following: NSAIDS, for example, diclofenac, naproxen, ibuprofen, piroxicam, indomethacin; COX2 inhibitors, for example, Celecoxib, rofecoxib, valdecoxib; anti-malarials, for example, hydroxychloroquine; Steroids, for example, prednisone, prednisolone, budenoside, dexamethasone; Cytotoxics, for example, azathioprine, cyclophosphamide, mycophenolate mofetil, methotrexate; inhibitors of PDE4 or purine synthesis inhibitor, for example Cellcept. Binding proteins provided herein may also be combined with agents such as sulfasalazine, 5-aminosalicylic acid, olsalazine, Imuran and agents which interfere with synthesis, production or action of proinflammatory cytokines such as IL-1, for example, caspase inhibitors like IL-1β converting enzyme inhibitors and M-1ra. Binding proteins provided herein may also be used with T cell signaling inhibitors, for example, tyrosine kinase inhibitors; or molecules that target T cell activation molecules, for example, CTLA-4-IgG or anti-B7 family antibodies, anti-PD-1 family antibodies. Binding proteins provided herein, can be combined with IL-11 or anti-cytokine antibodies, for example, fonotolizumab (anti-IFNg antibody), or anti-receptor receptor antibodies, for example, anti-IL-6 receptor antibody and antibodies to B-cell surface molecules. Antibodies provided herein or antigen binding portion thereof may also be used with LJP 394 (abetimus), agents that deplete or inactivate B-cells, for example, Rituximab (anti-CD20 antibody), lymphostat-B (anti-BlyS antibody), TNF antagonists, for example, anti-TNF antibodies, Adalimumab (PCT Publication No. WO 97/29131; HUMIRA), CA2 (REMICADE), CDP 571, TNFR-Ig constructs, (p75TNFRIgG (ENBREL) and p55TNFRIgG (LENERCEPT)) and bcl-2 inhibitors, because bcl-2 overexpression in transgenic mice has been demonstrated to cause a lupus like phenotype (see Marquina, Regina et al., Journal of Immunology (2004), 172(11), 7177-7185), therefore inhibition is expected to have therapeutic effects.

[0326] The pharmaceutical compositions provided herein may include a “therapeutically effective amount” or a “prophylactically effective amount” of a binding protein provided herein. A “therapeutically effective amount” refers to an amount effective, at dosages and for periods of time necessary, to achieve the desired therapeutic result. A therapeutically effective amount of the binding protein may be determined by a person skilled in the art and may vary according to factors such as the disease state, age, sex, and weight of the individual, and the ability of the binding protein to elicit a desired response in the individual. A therapeutically effective amount is also one in which any toxic or detrimental effects of the antibody, or antibody portion, are outweighed by the therapeutically beneficial effects. A “prophylactically effective amount” refers to an amount effective, at dosages and for periods of time necessary, to achieve the desired prophylactic result. Typically, since a prophylactic dose is used in subjects prior to or at an earlier stage of disease, the prophylactically effective amount will be less than the therapeutically effective amount.

[0327] Dosage regimens may be adjusted to provide the optimum desired response (e.g., a therapeutic or prophylactic response). For example, a single bolus may be administered, several divided doses may be administered over time or the dose may be proportionally reduced or increased as indicated by the exigencies of the therapeutic situation. It is especially advantageous to formulate parenteral compositions in dosage unit form for ease of administration and uniformity of dosage. Dosage unit form as used herein refers to physically discrete units suited as unitary dosages for the mammalian subjects to be treated; each unit containing a predetermined quantity of active compound calculated to produce the desired therapeutic effect in association with the required pharmaceutical carrier. The specification for the dosage unit forms provided herein are dictated by and directly dependent on (a) the unique characteristics of the active compound and the particular therapeutic or prophylactic effect to be achieved, and (b) the limitations inherent in the art of compounding such an active compound for the treatment of sensitivity in individuals.

[0328] An exemplary, non-limiting range for a therapeutically or prophylactically effective amount of a binding protein provided herein is 0.1-20 mg/kg, for example, 1-10 mg/kg. It is to be noted that dosage values may vary with the type and severity of the condition to be alleviated. It is to be further understood that for any particular subject, specific dosage regimens should be adjusted over time according to the individual need and the professional judgment of the person administering or supervising the administration of the compositions, and that dosage ranges set forth herein are exemplary only and are not intended to limit the scope or practice of the claimed composition.

### V. Diagnostics

[0329] The disclosure herein also provides diagnostic applications. This is further elucidated below.

### A. Method of Assay

[0330] The present disclosure also provides a method for determining the presence, amount or concentration of an analyte (or a fragment thereof) in a test sample using at least one DVD-Ig as described herein. Any suitable assay as is known in the art can be used in the method. Examples include, but are not limited to, immunoassay, such as sandwich immunoassay (e.g., monoclonal, polyclonal and/or DVD-Ig sandwich immunoassays or any variation thereof (e.g., monoclonal/DVD-Ig, DVD-Ig/polyclonal, etc.), including radioisotope detection (radioimmunoassay (RIA)) and enzyme detection (enzyme immunoassay (EIA) or enzyme-linked immunosorbent assay (ELISA) (e.g., Quantikine ELISA assays, R&D Systems, Minneapolis, Minn.))), competitive inhibition immunoassay (e.g., forward and reverse), fluorescence polarization immunoassay (FPIA), enzyme multiplied immunoassay technique (EMIT), bioluminescence resonance energy transfer (BRET), and homogeneous chemiluminescent assay, etc. In a SELDI-based immunoassay, a capture reagent that specifically binds an analyte (or a fragment thereof) of interest is attached to the surface of a mass spectrometry probe, such as a pre-activated protein chip array. The analyte (or a fragment thereof) is then specifically captured on the biochip, and the captured analyte (or a fragment thereof) is detected by mass spectrometry. Alternatively, the analyte (or a fragment thereof) can be eluted from the capture reagent and detected by traditional MALDI (matrix-assisted laser desorption/ionization) or by SELDI. A chemiluminescent microparticle immunoassay, in particular one employing the ARCHITECT® automated analyzer (Abbott Laboratories, Abbott Park, Ill.), is an example of a preferred immunoassay.

[0331] Methods well-known in the art for collecting, handling and processing urine, blood, serum and plasma, and other body fluids, are used in the practice of the present disclosure, for instance, when a DVD-Ig as described herein is employed as an immunodiagnostic reagent and/or in an analyte immunoassay kit. The test sample can comprise further moieties in addition to the analyte of interest, such as antibodies, antigens, haptens, hormones, drugs, enzymes, receptors, proteins, peptides, polypeptides, oligonucleotides and/or polynucleotides. For example, the sample can be a whole blood sample obtained from a subject. It can be necessary or desired that a test sample, particularly whole blood, be treated prior to immunoassay as described herein, e.g., with a pretreatment reagent. Even in cases where pretreatment is not necessary (e.g., most urine samples), pretreatment optionally can be done (e.g., as part of a regimen on a commercial platform).

[0332] The pretreatment reagent can be any reagent appropriate for use with the immunoassay and kits provided herein. The pretreatment optionally comprises: (a) one or more solvents (e.g., methanol and ethylene glycol) and optionally, salt, (b) one or more solvents and salt, and optionally, detergent, (c) detergent, or (d) detergent and salt. Pretreatment reagents are known in the art, and such pretreatment can be employed, e.g., as used for assays on Abbott TDx, AxSYM®, and ARCHITECT® analyzers (Abbott Laboratories, Abbott Park, Ill.), as described in the literature (see, e.g., Yatscoff et al., Abbott TDx Monoclonal Antibody Assay Evaluated for Measuring Cyclosporine in Whole Blood, Clin. Chem. 36: 1969-1973 (1990), and Wallemacq et al., Evaluation of the New AxSYM Cyclosporine Assay: Comparison with TDx Monoclonal Whole Blood and EMIT Cyclosporine Assays, Clin. Chem. 45: 432-435 (1999)), and/or as commercially available. Additionally, pretreatment can be done as described in Abbott's U.S. Pat. No. 5,135,875, European Pat. Pub. No. 0 471 293, U.S. Provisional Pat. App. 60/878,017, filed Dec. 29, 2006, and U.S. Pat. App. Pub. No. 2008/0020401 (incorporated by reference in its entirety for its teachings regarding pretreatment). The pretreatment reagent can be a heterogeneous agent or a homogeneous agent.

[0333] With use of a heterogeneous pretreatment reagent, the pretreatment reagent precipitates analyte binding protein (e.g., protein that can bind to an analyte or a fragment thereof) present in the sample. Such a pretreatment step comprises removing any analyte binding protein by separating from the precipitated analyte binding protein the supernatant of the mixture formed by addition of the pretreatment agent to sample. In such an assay, the supernatant of the mixture absent any binding protein is used in the assay, proceeding directly to the antibody capture step.

[0334] With use of a homogeneous pretreatment reagent there is no such separation step. The entire mixture of test sample and pretreatment reagent are contacted with a labeled specific binding partner for analyte (or a fragment thereof), such as a labeled anti-analyte antibody (or an antigenically reactive fragment thereof). The pretreatment reagent employed for such an assay typically is diluted in the pretreated test sample mixture, either before or during capture by the first specific binding partner. Despite such dilution, a certain amount of the pretreatment reagent is still present (or remains) in the test sample mixture during capture. In one embodiment, the labeled specific binding partner can be a DVD-Ig (or a fragment, a variant, or a fragment of a variant thereof).

[0335] In a heterogeneous format, after the test sample is obtained from a subject, a first mixture is prepared. The mixture contains the test sample being assessed for an analyte (or a fragment thereof) and a first specific binding partner, wherein the first specific binding partner and any analyte contained in the test sample form a first specific binding partner-analyte complex. Preferably, the first specific binding partner is an anti-analyte antibody or a fragment thereof. The first specific binding partner can be a DVD-Ig (or a fragment, a variant, or a fragment of a variant thereof) as described herein. The order in which the test sample and the first specific binding partner are added to form the mixture is not critical. Preferably, the first specific binding partner is immobilized on a solid phase. The solid phase used in the immunoassay (for the first specific binding partner and, optionally, the second specific binding partner) can be any solid phase known in the art, such as, but not limited to, a magnetic particle, a bead, a test tube, a microtiter plate, a cuvette, a membrane, a scaffolding molecule, a film, a filter paper, a disc and a chip.

[0336] After the mixture containing the first specific binding partner-analyte complex is formed, any unbound analyte is removed from the complex using any technique known in the art. For example, the unbound analyte can be removed by washing. Desirably, however, the first specific binding partner is present in excess of any analyte present in the test sample, such that all analyte that is present in the test sample is bound by the first specific binding partner.

[0337] After any unbound analyte is removed, a second specific binding partner is added to the mixture to form a first specific binding partner-analyte-second specific binding partner complex. The second specific binding partner is preferably an anti-analyte antibody that binds to an epitope on analyte that differs from the epitope on analyte bound by the first specific binding partner. Moreover, also preferably, the second specific binding partner is labeled with or contains a detectable label as described above. The second specific binding partner can be a DVD-Ig (or a fragment, a variant, or a fragment of a variant thereof) as described herein.

[0338] Any suitable detectable label as is known in the art can be used. For example, the detectable label can be a radioactive label (such as 3H, 125I, 35S, 14C, 32P, and 33P), an enzymatic label (such as horseradish peroxidase, alkaline peroxidase, glucose 6-phosphate dehydrogenase, and the like), a chemiluminescent label (such as acridinium esters, thioesters, or sulfonamides; luminol, isoluminol, phenanthridinium esters, and the like), a fluorescent label (such as fluorescein (e.g., 5-fluorescein, 6-carboxyfluorescein, 3′6-carboxyfluorescein, 5(6)-carboxyfluorescein, 6-hexachloro-fluorescein, 6-tetrachlorofluorescein, fluorescein isothiocyanate, and the like)), rhodamine, phycobiliproteins, R-phycoerythrin, quantum dots (e.g., zinc sulfide-capped cadmium selenide), a thermometric label, or an immuno-polymerase chain reaction label. An introduction to labels, labeling procedures and detection of labels is found in Polak and Van Noorden, Introduction to Immunocytochemistry, 2nd ed., Springer Verlag, N.Y. (1997), and in Haugland, Handbook of Fluorescent Probes and Research Chemicals (1996), which is a combined handbook and catalogue published by Molecular Probes, Inc., Eugene, Oreg. A fluorescent label can be used in FPIA (see, e.g., U.S. Pat. Nos. 5,593,896, 5,573,904, 5,496,925, 5,359,093, and 5,352,803, which are hereby incorporated by reference in their entireties). An acridinium compound can be used as a detectable label in a homogeneous or heterogeneous chemiluminescent assay (see, e.g., Adamczyk et al., Bioorg. Med. Chem. Lett. 16: 1324-1328 (2006); Adamczyk et al., Bioorg. Med. Chem. Lett. 4: 2313-2317 (2004); Adamczyk et al., Biorg. Med. Chem. Lett. 14: 3917-3921 (2004); and Adamczyk et al., Org. Lett. 5: 3779-3782 (2003)).

[0339] A preferred acridinium compound is an acridinium-9-carboxamide. Methods for preparing acridinium 9-carboxamides are described in Mattingly, J. Biolumin. Chemilumin. 6: 107-114 (1991); Adamczyk et al., J. Org. Chem. 63: 5636-5639 (1998); Adamczyk et al., Tetrahedron 55: 10899-10914 (1999); Adamczyk et al., Org. Lett. 1: 779-781 (1999); Adamczyk et al., Bioconjugate Chem. 11: 714-724 (2000); Mattingly et al., In Luminescence Biotechnology: Instruments and Applications; Dyke, K. V. Ed.; CRC Press: Boca Raton, pp. 77-105 (2002); Adamczyk et al., Org. Lett. 5: 3779-3782 (2003); and U.S. Pat. Nos. 5,468,646, 5,543,524 and 5,783,699 (each of which is incorporated herein by reference in its entirety for its teachings regarding same). Another preferred acridinium compound is an acridinium-9-carboxylate aryl ester. An example of an acridinium-9-carboxylate aryl ester is 10-methyl-9-(phenoxycarbonyl)acridinium fluorosulfonate (available from Cayman Chemical, Ann Arbor, Mich.). Methods for preparing acridinium 9-carboxylate aryl esters are described in McCapra et al., Photochem. Photobiol. 4: 1111-21 (1965); Razavi et al., Luminescence 15: 245-249 (2000); Razavi et al., Luminescence 15: 239-244 (2000); and U.S. Pat. No. 5,241,070 (each of which is incorporated herein by reference in its entirety for its teachings regarding same). Further details regarding acridinium-9-carboxylate aryl ester and its use are set forth in US 2008-0248493.

[0340] Chemiluminescent assays (e.g., using acridinium as described above or other chemiluminescent agents) can be performed in accordance with the methods described in Adamczyk et al., Anal. Chim. Acta 579(1): 61-67 (2006). While any suitable assay format can be used, a microplate chemiluminometer (Mithras LB-940, Berthold Technologies U.S.A., LLC, Oak Ridge, Tenn.) enables the assay of multiple samples of small volumes rapidly.

[0341] The order in which the test sample and the specific binding partner(s) are added to form the mixture for chemiluminescent assay is not critical. If the first specific binding partner is detectably labeled with a chemiluminescent agent such as an acridinium compound, detectably labeled first specific binding partner-analyte complexes form. Alternatively, if a second specific binding partner is used and the second specific binding partner is detectably labeled with a chemiluminescent agent such as an acridinium compound, detectably labeled first specific binding partner-analyte-second specific binding partner complexes form. Any unbound specific binding partner, whether labeled or unlabeled, can be removed from the mixture using any technique known in the art, such as washing.

[0342] Hydrogen peroxide can be generated in situ in the mixture or provided or supplied to the mixture (e.g., the source of the hydrogen peroxide being one or more buffers or other solutions that are known to contain hydrogen peroxide) before, simultaneously with, or after the addition of an above-described acridinium compound. Hydrogen peroxide can be generated in situ in a number of ways such as would be apparent to one skilled in the art.

[0343] Upon the simultaneous or subsequent addition of at least one basic solution to the sample, a detectable signal, namely, a chemiluminescent signal, indicative of the presence of analyte is generated. The basic solution contains at least one base and has a pH greater than or equal to 10, preferably, greater than or equal to 12. Examples of basic solutions include, but are not limited to, sodium hydroxide, potassium hydroxide, calcium hydroxide, ammonium hydroxide, magnesium hydroxide, sodium carbonate, sodium bicarbonate, calcium hydroxide, calcium carbonate, and calcium bicarbonate. The amount of basic solution added to the sample depends on the concentration of the basic solution. Based on the concentration of the basic solution used, one skilled in the art can easily determine the amount of basic solution to add to the sample.

[0344] The chemiluminescent signal that is generated can be detected using routine techniques known to those skilled in the art. Based on the intensity of the signal generated, the amount of analyte in the sample can be quantified. Specifically, the amount of analyte in the sample is proportional to the intensity of the signal generated. The amount of analyte present can be quantified by comparing the amount of light generated to a standard curve for analyte or by comparison to a reference standard. The standard curve can be generated using serial dilutions or solutions of known concentrations of analyte by mass spectroscopy, gravimetric methods, and other techniques known in the art. While the above is described with emphasis on use of an acridinium compound as the chemiluminescent agent, one of ordinary skill in the art can readily adapt this description for use of other chemiluminescent agents.

[0345] Analyte immunoassays generally can be conducted using any format known in the art, such as, but not limited to, a sandwich format. Specifically, in one immunoassay format, at least two antibodies are employed to separate and quantify analyte, such as human analyte, or a fragment thereof in a sample. More specifically, the at least two antibodies bind to different epitopes on an analyte (or a fragment thereof) forming an immune complex, which is referred to as a “sandwich.” Generally, in the immunoassays one or more antibodies can be used to capture the analyte (or a fragment thereof) in the test sample (these antibodies are frequently referred to as a “capture” antibody or “capture” antibodies) and one or more antibodies can be used to bind a detectable (namely, quantifiable) label to the sandwich (these antibodies are frequently referred to as the “detection antibody,” the “detection antibodies,” the “conjugate,” or the “conjugates”). Thus, in the context of a sandwich immunoassay format, a DVD-Ig (or a fragment, a variant, or a fragment of a variant thereof) as described herein can be used as a capture antibody, a detection antibody, or both. For example, one DVD-Ig having a domain that can bind a first epitope on an analyte (or a fragment thereof) can be used as a capture antibody and/or another DVD-Ig having a domain that can bind a second epitope on an analyte (or a fragment thereof) can be used as a detection antibody. In this regard, a DVD-Ig having a first domain that can bind a first epitope on an analyte (or a fragment thereof) and a second domain that can bind a second epitope on an analyte (or a fragment thereof) can be used as a capture antibody and/or a detection antibody. Alternatively, one DVD-Ig having a first domain that can bind an epitope on a first analyte (or a fragment thereof) and a second domain that can bind an epitope on a second analyte (or a fragment thereof) can be used as a capture antibody and/or a detection antibody to detect, and optionally quantify, two or more analytes. In the event that an analyte can be present in a sample in more than one form, such as a monomeric form and a dimeric/multimeric form, which can be homomeric or heteromeric, one DVD-Ig having a domain that can bind an epitope that is only exposed on the monomeric form and another DVD-Ig having a domain that can bind an epitope on a different part of a dimeric/multimeric form can be used as capture antibodies and/or detection antibodies, thereby enabling the detection, and optional quantification, of different forms of a given analyte. Furthermore, employing DVD-Igs with differential affinities within a single DVD-Ig and/or between DVD-Igs can provide an avidity advantage. In the context of immunoassays as described herein, it generally may be helpful or desired to incorporate one or more linkers within the structure of a DVD-Ig. When present, optimally the linker should be of sufficient length and structural flexibility to enable binding of an epitope by the inner domains as well as binding of another epitope by the outer domains. In this regard, if a DVD-Ig can bind two different analytes and one analyte is larger than the other, desirably the larger analyte is bound by the outer domains.

[0346] Generally speaking, a sample being tested for (for example, suspected of containing) analyte (or a fragment thereof) can be contacted with at least one capture antibody (or antibodies) and at least one detection antibody (which can be a second detection antibody or a third detection antibody or even a successively numbered antibody, e.g., as where the capture and/or detection antibody comprise multiple antibodies) either simultaneously or sequentially and in any order. For example, the test sample can be first contacted with at least one capture antibody and then (sequentially) with at least one detection antibody. Alternatively, the test sample can be first contacted with at least one detection antibody and then (sequentially) with at least one capture antibody. In yet another alternative, the test sample can be contacted simultaneously with a capture antibody and a detection antibody.

[0347] In the sandwich assay format, a sample suspected of containing analyte (or a fragment thereof) is first brought into contact with at least one first capture antibody under conditions that allow the formation of a first antibody/analyte complex. If more than one capture antibody is used, a first capture antibody/analyte complex comprising two or more capture antibodies is formed. In a sandwich assay, the antibodies, i.e., preferably, the at least one capture antibody, are used in molar excess amounts of the maximum amount of analyte (or a fragment thereof) expected in the test sample. For example, from about 5 μg to about 1 mg of antibody per mL of buffer (e.g., microparticle coating buffer) can be used.

[0348] Competitive inhibition immunoassays, which are often used to measure small analytes because binding by only one antibody is required, comprise sequential and classic formats. In a sequential competitive inhibition immunoassay a capture antibody to an analyte of interest is coated onto a well of a microtiter plate or other solid support. When the sample containing the analyte of interest is added to the well, the analyte of interest binds to the capture antibody. After washing, a known amount of labeled (e.g., biotin or horseradish peroxidase (HRP)) analyte is added to the well. A substrate for an enzymatic label is necessary to generate a signal. An example of a suitable substrate for HRP is 3,3′,5,5′-tetramethylbenzidine (TMB). After washing, the signal generated by the labeled analyte is measured and is inversely proportional to the amount of analyte in the sample. In a classic competitive inhibition immunoassay an antibody to an analyte of interest is coated onto a solid support (e.g., a well of a microtiter plate). However, unlike the sequential competitive inhibition immunoassay, the sample and the labeled analyte are added to the well at the same time. Any analyte in the sample competes with labeled analyte for binding to the capture antibody. After washing, the signal generated by the labeled analyte is measured and is inversely proportional to the amount of analyte in the sample.

[0349] Optionally, prior to contacting the test sample with the at least one capture antibody (for example, the first capture antibody), the at least one capture antibody can be bound to a solid support, which facilitates the separation of the first antibody/analyte (or a fragment thereof) complex from the test sample. The substrate to which the capture antibody is bound can be any suitable solid support or solid phase that facilitates separation of the capture antibody-analyte complex from the sample.

[0350] Examples include a well of a plate, such as a microtiter plate, a test tube, a porous gel (e.g., silica gel, agarose, dextran, or gelatin), a polymeric film (e.g., polyacrylamide), beads (e.g., polystyrene beads or magnetic beads), a strip of a filter/membrane (e.g., nitrocellulose or nylon), microparticles (e.g., latex particles, magnetizable microparticles (e.g., microparticles having ferric oxide or chromium oxide cores and homo- or hetero-polymeric coats and radii of about 1-10 microns). The substrate can comprise a suitable porous material with a suitable surface affinity to bind antigens and sufficient porosity to allow access by detection antibodies. A microporous material is generally preferred, although a gelatinous material in a hydrated state can be used. Such porous substrates are preferably in the form of sheets having a thickness of about 0.01 to about 0.5 mm, preferably about 0.1 mm. While the pore size may vary quite a bit, preferably the pore size is from about 0.025 to about 15 microns, more preferably from about 0.15 to about 15 microns. The surface of such substrates can be activated by chemical processes that cause covalent linkage of an antibody to the substrate. Irreversible binding, generally by adsorption through hydrophobic forces, of the antigen or the antibody to the substrate results; alternatively, a chemical coupling agent or other means can be used to bind covalently the antibody to the substrate, provided that such binding does not interfere with the ability of the antibody to bind to analyte. Alternatively, the antibody can be bound with microparticles, which have been previously coated with streptavidin (e.g., DYNAL® Magnetic Beads, Invitrogen, Carlsbad, Calif.) or biotin (e.g., using Power-Bind™-SA-MP streptavidin-coated microparticles (Seradyn, Indianapolis, Ind.)) or anti-species-specific monoclonal antibodies. If necessary, the substrate can be derivatized to allow reactivity with various functional groups on the antibody. Such derivatization requires the use of certain coupling agents, examples of which include, but are not limited to, maleic anhydride, N-hydroxysuccinimide, and 1-ethyl-3-(3-dimethylaminopropyl) carbodiimide. If desired, one or more capture reagents, such as antibodies (or fragments thereof), each of which is specific for analyte(s) can be attached to solid phases in different physical or addressable locations (e.g., such as in a biochip configuration (see, e.g., U.S. Pat. No. 6,225,047; Int'l Pat. App. Pub. No. WO 99/51773; U.S. Pat. No. 6,329,209; Int'l Pat. App. Pub. No. WO 00/56934, and U.S. Pat. No. 5,242,828). If the capture reagent is attached to a mass spectrometry probe as the solid support, the amount of analyte bound to the probe can be detected by laser desorption ionization mass spectrometry. Alternatively, a single column can be packed with different beads, which are derivatized with the one or more capture reagents, thereby capturing the analyte in a single place (see, antibody-derivatized, bead-based technologies, e.g., the xMAP technology of Luminex (Austin, Tex.)).

[0351] After the test sample being assayed for analyte (or a fragment thereof) is brought into contact with the at least one capture antibody (for example, the first capture antibody), the mixture is incubated in order to allow for the formation of a first antibody (or multiple antibody)-analyte (or a fragment thereof) complex. The incubation can be carried out at a pH of from about 4.5 to about 10.0, at a temperature of from about 2° C. to about 45° C., and for a period from at least about one (1) minute to about eighteen (18) hours, preferably from about 1 to about 24 minutes, most preferably for about 4 to about 18 minutes. The immunoassay described herein can be conducted in one step (meaning the test sample, at least one capture antibody and at least one detection antibody are all added sequentially or simultaneously to a reaction vessel) or in more than one step, such as two steps, three steps, etc.

[0352] After formation of the (first or multiple) capture antibody/analyte (or a fragment thereof) complex, the complex is then contacted with at least one detection antibody under conditions which allow for the formation of a (first or multiple) capture antibody/analyte (or a fragment thereof)/second detection antibody complex). While captioned for clarity as the “second” antibody (e.g., second detection antibody), in fact, where multiple antibodies are used for capture and/or detection, the at least one detection antibody can be the second, third, fourth, etc. antibodies used in the immunoassay. If the capture antibody/analyte (or a fragment thereof) complex is contacted with more than one detection antibody, then a (first or multiple) capture antibody/analyte (or a fragment thereof)/(multiple) detection antibody complex is formed. As with the capture antibody (e.g., the first capture antibody), when the at least one (e.g., second and any subsequent) detection antibody is brought into contact with the capture antibody/analyte (or a fragment thereof) complex, a period of incubation under conditions similar to those described above is required for the formation of the (first or multiple) capture antibody/analyte (or a fragment thereof)/(second or multiple) detection antibody complex. Preferably, at least one detection antibody contains a detectable label. The detectable label can be bound to the at least one detection antibody (e.g., the second detection antibody) prior to, simultaneously with, or after the formation of the (first or multiple) capture antibody/analyte (or a fragment thereof)/(second or multiple) detection antibody complex. Any detectable label known in the art can be used (see discussion above, including of the Polak and Van Noorden (1997) and Haugland (1996) references).

[0353] The detectable label can be bound to the antibodies either directly or through a coupling agent. An example of a coupling agent that can be used is EDAC (1-ethyl-3-(3-dimethylaminopropyl) carbodiimide, hydrochloride), which is commercially available from Sigma-Aldrich, St. Louis, Mo. Other coupling agents that can be used are known in the art. Methods for binding a detectable label to an antibody are known in the art. Additionally, many detectable labels can be purchased or synthesized that already contain end groups that facilitate the coupling of the detectable label to the antibody, such as CPSP-Acridinium Ester (i.e., 9-[N-tosyl-N-(3-carboxypropyl)]-10-(3-sulfopropyl)acridinium carboxamide) or SPSP-Acridinium Ester (i.e., N10-(3-sulfopropyl)-N-(3-sulfopropyl)-acridinium-9-carboxamide).

[0354] The (first or multiple) capture antibody/analyte/(second or multiple) detection antibody complex can be, but does not have to be, separated from the remainder of the test sample prior to quantification of the label. For example, if the at least one capture antibody (e.g., the first capture antibody) is bound to a solid support, such as a well or a bead, separation can be accomplished by removing the fluid (of the test sample) from contact with the solid support. Alternatively, if the at least first capture antibody is bound to a solid support, it can be simultaneously contacted with the analyte-containing sample and the at least one second detection antibody to form a first (multiple) antibody/analyte/second (multiple) antibody complex, followed by removal of the fluid (test sample) from contact with the solid support. If the at least one first capture antibody is not bound to a solid support, then the (first or multiple) capture antibody/analyte/(second or multiple) detection antibody complex does not have to be removed from the test sample for quantification of the amount of the label.

[0355] After formation of the labeled capture antibody/analyte/detection antibody complex (e.g., the first capture antibody/analyte/second detection antibody complex), the amount of label in the complex is quantified using techniques known in the art. For example, if an enzymatic label is used, the labeled complex is reacted with a substrate for the label that gives a quantifiable reaction such as the development of color. If the label is a radioactive label, the label is quantified using appropriate means, such as a scintillation counter. If the label is a fluorescent label, the label is quantified by stimulating the label with a light of one color (which is known as the “excitation wavelength”) and detecting another color (which is known as the “emission wavelength”) that is emitted by the label in response to the stimulation. If the label is a chemiluminescent label, the label is quantified by detecting the light emitted either visually or by using luminometers, x-ray film, high speed photographic film, a CCD camera, etc. Once the amount of the label in the complex has been quantified, the concentration of analyte or a fragment thereof in the test sample is determined by appropriate means, such as by use of a standard curve that has been generated using serial dilutions of analyte or a fragment thereof of known concentration. Other than using serial dilutions of analyte or a fragment thereof, the standard curve can be generated gravimetrically, by mass spectroscopy and by other techniques known in the art.

[0356] In a chemiluminescent microparticle assay employing the ARCHITECT® analyzer, the conjugate diluent pH should be about 6.0+/−0.2, the microparticle coating buffer should be maintained at about room temperature (i.e., at from about 17 to about 27° C.), the microparticle coating buffer pH should be about 6.5+/−0.2, and the microparticle diluent pH should be about 7.8+/−0.2. Solids preferably are less than about 0.2%, such as less than about 0.15%, less than about 0.14%, less than about 0.13%, less than about 0.12%, or less than about 0.11%, such as about 0.10%.

[0357] FPIAs are based on competitive binding immunoassay principles. A fluorescently labeled compound, when excited by a linearly polarized light, will emit fluorescence having a degree of polarization inversely proportional to its rate of rotation. When a fluorescently labeled tracer-antibody complex is excited by a linearly polarized light, the emitted light remains highly polarized because the fluorophore is constrained from rotating between the time light is absorbed and the time light is emitted. When a “free” tracer compound (i.e., a compound that is not bound to an antibody) is excited by linearly polarized light, its rotation is much faster than the corresponding tracer-antibody conjugate produced in a competitive binding immunoassay. FPIAs are advantageous over RIAs inasmuch as there are no radioactive substances requiring special handling and disposal. In addition, FPIAs are homogeneous assays that can be easily and rapidly performed.

[0358] In view of the above, a method of determining the presence, amount, or concentration of analyte (or a fragment thereof) in a test sample is provided. The method comprises assaying the test sample for an analyte (or a fragment thereof) by an assay (i) employing (i′) at least one of an antibody, a fragment of an antibody that can bind to an analyte, a variant of an antibody that can bind to an analyte, a fragment of a variant of an antibody that can bind to an analyte, and a DVD-Ig (or a fragment, a variant, or a fragment of a variant thereof) that can bind to an analyte, and (ii') at least one detectable label and (ii) comprising comparing a signal generated by the detectable label as a direct or indirect indication of the presence, amount or concentration of analyte (or a fragment thereof) in the test sample to a signal generated as a direct or indirect indication of the presence, amount or concentration of analyte (or a fragment thereof) in a control or calibrator. The calibrator is optionally part of a series of calibrators, in which each of the calibrators differs from the other calibrators by the concentration of analyte.

[0359] The method can comprise (i) contacting the test sample with at least one first specific binding partner for analyte (or a fragment thereof) comprising an antibody, a fragment of an antibody that can bind to an analyte, a variant of an antibody that can bind to an analyte, a fragment of a variant of an antibody that can bind to an analyte, or a DVD-Ig (or a fragment, a variant, or a fragment of a variant thereof) that can bind to an analyte so as to form a first specific binding partner/analyte (or fragment thereof) complex, (ii) contacting the first specific binding partner/analyte (or fragment thereof) complex with at least one second specific binding partner for analyte (or fragment thereof) comprising a detectably labeled anti-analyte antibody, a detectably labeled fragment of an anti-analyte antibody that can bind to analyte, a detectably labeled variant of an anti-analyte antibody that can bind to analyte, a detectably labeled fragment of a variant of an anti-analyte antibody that can bind to analyte, or a detectably labeled DVD-Ig (or a fragment, a variant, or a fragment of a variant thereof) so as to form a first specific binding partner/analyte (or fragment thereof)/second specific binding partner complex, and (iii) determining the presence, amount or concentration of analyte in the test sample by detecting or measuring the signal generated by the detectable label in the first specific binding partner/analyte (or fragment thereof)/second specific binding partner complex formed in (ii). A method in which at least one first specific binding partner for analyte (or a fragment thereof) and/or at least one second specific binding partner for analyte (or a fragment thereof) is a DVD-Ig (or a fragment, a variant, or a fragment of a variant thereof) as described herein can be preferred.

[0360] Alternatively, the method can comprise contacting the test sample with at least one first specific binding partner for analyte (or a fragment thereof) comprising an antibody, a fragment of an antibody that can bind to an analyte, a variant of an antibody that can bind to an analyte, a fragment of a variant of an antibody that can bind to an analyte, or a DVD-Ig (or a fragment, a variant, or a fragment of a variant thereof) and simultaneously or sequentially, in either order, contacting the test sample with at least one second specific binding partner, which can compete with analyte (or a fragment thereof) for binding to the at least one first specific binding partner and which comprises a detectably labeled analyte, a detectably labeled fragment of analyte that can bind to the first specific binding partner, a detectably labeled variant of analyte that can bind to the first specific binding partner, or a detectably labeled fragment of a variant of analyte that can bind to the first specific binding partner. Any analyte (or a fragment thereof) present in the test sample and the at least one second specific binding partner compete with each other to form a first specific binding partner/analyte (or fragment thereof) complex and a first specific binding partner/second specific binding partner complex, respectively. The method further comprises determining the presence, amount or concentration of analyte in the test sample by detecting or measuring the signal generated by the detectable label in the first specific binding partner/second specific binding partner complex formed in (ii), wherein the signal generated by the detectable label in the first specific binding partner/second specific binding partner complex is inversely proportional to the amount or concentration of analyte in the test sample.

[0361] The above methods can further comprise diagnosing, prognosticating, or assessing the efficacy of a therapeutic/prophylactic treatment of a patient from whom the test sample was obtained. If the method further comprises assessing the efficacy of a therapeutic/prophylactic treatment of the patient from whom the test sample was obtained, the method optionally further comprises modifying the therapeutic/prophylactic treatment of the patient as needed to improve efficacy. The method can be adapted for use in an automated system or a semi-automated system.

[0362] With regard to the methods of assay (and kit therefor), it may be possible to employ commercially available anti-analyte antibodies or methods for production of anti-analyte as described in the literature. Commercial supplies of various antibodies include, but are not limited to, Santa Cruz Biotechnology Inc. (Santa Cruz, Calif.), GenWay Biotech, Inc. (San Diego, Calif.), and R&D Systems (RDS; Minneapolis, Minn.).

[0363] Generally, a predetermined level can be employed as a benchmark against which to assess results obtained upon assaying a test sample for analyte or a fragment thereof, e.g., for detecting disease or risk of disease. Generally, in making such a comparison, the predetermined level is obtained by running a particular assay a sufficient number of times and under appropriate conditions such that a linkage or association of analyte presence, amount or concentration with a particular stage or endpoint of a disease, disorder or condition or with particular clinical indicia can be made. Typically, the predetermined level is obtained with assays of reference subjects (or populations of subjects). The analyte measured can include fragments thereof, degradation products thereof, and/or enzymatic cleavage products thereof.

[0364] In particular, with respect to a predetermined level as employed for monitoring disease progression and/or treatment, the amount or concentration of analyte or a fragment thereof may be “unchanged,” “favorable” (or “favorably altered”), or “unfavorable” (or “unfavorably altered”). “Elevated” or “increased” refers to an amount or a concentration in a test sample that is higher than a typical or normal level or range (e.g., predetermined level), or is higher than another reference level or range (e.g., earlier or baseline sample). The term “lowered” or “reduced” refers to an amount or a concentration in a test sample that is lower than a typical or normal level or range (e.g., predetermined level), or is lower than another reference level or range (e.g., earlier or baseline sample). The term “altered” refers to an amount or a concentration in a sample that is altered (increased or decreased) over a typical or normal level or range (e.g., predetermined level), or over another reference level or range (e.g., earlier or baseline sample).

[0365] The typical or normal level or range for analyte is defined in accordance with standard practice. Because the levels of analyte in some instances will be very low, a so-called altered level or alteration can be considered to have occurred when there is any net change as compared to the typical or normal level or range, or reference level or range, that cannot be explained by experimental error or sample variation. Thus, the level measured in a particular sample will be compared with the level or range of levels determined in similar samples from a so-called normal subject. In this context, a “normal subject” is an individual with no detectable disease, for example, and a “normal” (sometimes termed “control”) patient or population is/are one(s) that exhibit(s) no detectable disease, respectively, for example. Furthermore, given that analyte is not routinely found at a high level in the majority of the human population, a “normal subject” can be considered an individual with no substantial detectable increased or elevated amount or concentration of analyte, and a “normal” (sometimes termed “control”) patient or population is/are one(s) that exhibit(s) no substantial detectable increased or elevated amount or concentration of analyte. An “apparently normal subject” is one in which analyte has not yet been or currently is being assessed. The level of an analyte is said to be “elevated” when the analyte is normally undetectable (e.g., the normal level is zero, or within a range of from about 25 to about 75 percentiles of normal populations), but is detected in a test sample, as well as when the analyte is present in the test sample at a higher than normal level. Thus, inter alia, the disclosure provides a method of screening for a subject having, or at risk of having, a particular disease, disorder, or condition. The method of assay can also involve the assay of other markers and the like.

[0366] Accordingly, the methods described herein also can be used to determine whether or not a subject has or is at risk of developing a given disease, disorder or condition. Specifically, such a method can comprise the steps of:

[0367] (a) determining the concentration or amount in a test sample from a subject of analyte (or a fragment thereof) (e.g., using the methods described herein, or methods known in the art); and

[0368] (b) comparing the concentration or amount of analyte (or a fragment thereof) determined in step (a) with a predetermined level, wherein, if the concentration or amount of analyte determined in step (a) is favorable with respect to a predetermined level, then the subject is determined not to have or be at risk for a given disease, disorder or condition. However, if the concentration or amount of analyte determined in step (a) is unfavorable with respect to the predetermined level, then the subject is determined to have or be at risk for a given disease, disorder or condition.

[0369] Additionally, provided herein is method of monitoring the progression of disease in a subject. Optimally the method comprising the steps of:

[0370] (a) determining the concentration or amount in a test sample from a subject of analyte;

[0371] (b) determining the concentration or amount in a later test sample from the subject of analyte; and

[0372] (c) comparing the concentration or amount of analyte as determined in step (b) with the concentration or amount of analyte determined in step (a), wherein if the concentration or amount determined in step (b) is unchanged or is unfavorable when compared to the concentration or amount of analyte determined in step (a), then the disease in the subject is determined to have continued, progressed or worsened. By comparison, if the concentration or amount of analyte as determined in step (b) is favorable when compared to the concentration or amount of analyte as determined in step (a), then the disease in the subject is determined to have discontinued, regressed or improved.

[0373] Optionally, the method further comprises comparing the concentration or amount of analyte as determined in step (b), for example, with a predetermined level. Further, optionally the method comprises treating the subject with one or more pharmaceutical compositions for a period of time if the comparison shows that the concentration or amount of analyte as determined in step (b), for example, is unfavorably altered with respect to the predetermined level.

[0374] Still further, the methods can be used to monitor treatment in a subject receiving treatment with one or more pharmaceutical compositions. Specifically, such methods involve providing a first test sample from a subject before the subject has been administered one or more pharmaceutical compositions. Next, the concentration or amount in a first test sample from a subject of analyte is determined (e.g., using the methods described herein or as known in the art). After the concentration or amount of analyte is determined, optionally the concentration or amount of analyte is then compared with a predetermined level. If the concentration or amount of analyte as determined in the first test sample is lower than the predetermined level, then the subject is not treated with one or more pharmaceutical compositions. However, if the concentration or amount of analyte as determined in the first test sample is higher than the predetermined level, then the subject is treated with one or more pharmaceutical compositions for a period of time. The period of time that the subject is treated with the one or more pharmaceutical compositions can be determined by one skilled in the art (for example, the period of time can be from about seven (7) days to about two years, preferably from about fourteen (14) days to about one (1) year).

[0375] During the course of treatment with the one or more pharmaceutical compositions, second and subsequent test samples are then obtained from the subject. The number of test samples and the time in which said test samples are obtained from the subject are not critical. For example, a second test sample could be obtained seven (7) days after the subject is first administered the one or more pharmaceutical compositions, a third test sample could be obtained two (2) weeks after the subject is first administered the one or more pharmaceutical compositions, a fourth test sample could be obtained three (3) weeks after the subject is first administered the one or more pharmaceutical compositions, a fifth test sample could be obtained four (4) weeks after the subject is first administered the one or more pharmaceutical compositions, etc.

[0376] After each second or subsequent test sample is obtained from the subject, the concentration or amount of analyte is determined in the second or subsequent test sample is determined (e.g., using the methods described herein or as known in the art). The concentration or amount of analyte as determined in each of the second and subsequent test samples is then compared with the concentration or amount of analyte as determined in the first test sample (e.g., the test sample that was originally optionally compared to the predetermined level). If the concentration or amount of analyte as determined in step (c) is favorable when compared to the concentration or amount of analyte as determined in step (a), then the disease in the subject is determined to have discontinued, regressed or improved, and the subject should continue to be administered the one or pharmaceutical compositions of step (b). However, if the concentration or amount determined in step (c) is unchanged or is unfavorable when compared to the concentration or amount of analyte as determined in step (a), then the disease in the subject is determined to have continued, progressed or worsened, and the subject should be treated with a higher concentration of the one or more pharmaceutical compositions administered to the subject in step (b) or the subject should be treated with one or more pharmaceutical compositions that are different from the one or more pharmaceutical compositions administered to the subject in step (b). Specifically, the subject can be treated with one or more pharmaceutical compositions that are different from the one or more pharmaceutical compositions that the subject had previously received to decrease or lower said subject's analyte level.

[0377] Generally, for assays in which repeat testing may be done (e.g., monitoring disease progression and/or response to treatment), a second or subsequent test sample is obtained at a period in time after the first test sample has been obtained from the subject. Specifically, a second test sample from the subject can be obtained minutes, hours, days, weeks or years after the first test sample has been obtained from the subject. For example, the second test sample can be obtained from the subject at a time period of about 1 minute, about 5 minutes, about 10 minutes, about 15 minutes, about 30 minutes, about 45 minutes, about 60 minutes, about 2 hours, about 3 hours, about 4 hours, about 5 hours, about 6 hours, about 7 hours, about 8 hours, about 9 hours, about 10 hours, about 11 hours, about 12 hours, about 13 hours, about 14 hours, about 15 hours, about 16 hours, about 17 hours, about 18 hours, about 19 hours, about 20 hours, about 21 hours, about 22 hours, about 23 hours, about 24 hours, about 2 days, about 3 days, about 4 days, about 5 days, about 6 days, about 7 days, about 2 weeks, about 3 weeks, about 4 weeks, about 5 weeks, about 6 weeks, about 7 weeks, about 8 weeks, about 9 weeks, about 10 weeks, about 11 weeks, about 12 weeks, about 13 weeks, about 14 weeks, about 15 weeks, about 16 weeks, about 17 weeks, about 18 weeks, about 19 weeks, about 20 weeks, about 21 weeks, about 22 weeks, about 23 weeks, about 24 weeks, about 25 weeks, about 26 weeks, about 27 weeks, about 28 weeks, about 29 weeks, about 30 weeks, about 31 weeks, about 32 weeks, about 33 weeks, about 34 weeks, about 35 weeks, about 36 weeks, about 37 weeks, about 38 weeks, about 39 weeks, about 40 weeks, about 41 weeks, about 42 weeks, about 43 weeks, about 44 weeks, about 45 weeks, about 46 weeks, about 47 weeks, about 48 weeks, about 49 weeks, about 50 weeks, about 51 weeks, about 52 weeks, about 1.5 years, about 2 years, about 2.5 years, about 3.0 years, about 3.5 years, about 4.0 years, about 4.5 years, about 5.0 years, about 5.5. years, about 6.0 years, about 6.5 years, about 7.0 years, about 7.5 years, about 8.0 years, about 8.5 years, about 9.0 years, about 9.5 years or about 10.0 years after the first test sample from the subject is obtained.

[0378] When used to monitor disease progression, the above assay can be used to monitor the progression of disease in subjects suffering from acute conditions. Acute conditions, also known as critical care conditions, refer to acute, life-threatening diseases or other critical medical conditions involving, for example, the cardiovascular system or excretory system. Typically, critical care conditions refer to those conditions requiring acute medical intervention in a hospital-based setting (including, but not limited to, the emergency room, intensive care unit, trauma center, or other emergent care setting) or administration by a paramedic or other field-based medical personnel. For critical care conditions, repeat monitoring is generally done within a shorter time frame, namely, minutes, hours or days (e.g., about 1 minute, about 5 minutes, about 10 minutes, about 15 minutes, about 30 minutes, about 45 minutes, about 60 minutes, about 2 hours, about 3 hours, about 4 hours, about 5 hours, about 6 hours, about 7 hours, about 8 hours, about 9 hours, about 10 hours, about 11 hours, about 12 hours, about 13 hours, about 14 hours, about 15 hours, about 16 hours, about 17 hours, about 18 hours, about 19 hours, about 20 hours, about 21 hours, about 22 hours, about 23 hours, about 24 hours, about 2 days, about 3 days, about 4 days, about 5 days, about 6 days or about 7 days), and the initial assay likewise is generally done within a shorter timeframe, e.g., about minutes, hours or days of the onset of the disease or condition.

[0379] The assays also can be used to monitor the progression of disease in subjects suffering from chronic or non-acute conditions. Non-critical care or, non-acute conditions, refers to conditions other than acute, life-threatening disease or other critical medical conditions involving, for example, the cardiovascular system and/or excretory system. Typically, non-acute conditions include those of longer-term or chronic duration. For non-acute conditions, repeat monitoring generally is done with a longer timeframe, e.g., hours, days, weeks, months or years (e.g., about 1 hour, about 2 hours, about 3 hours, about 4 hours, about 5 hours, about 6 hours, about 7 hours, about 8 hours, about 9 hours, about 10 hours, about 11 hours, about 12 hours, about 13 hours, about 14 hours, about 15 hours, about 16 hours, about 17 hours, about 18 hours, about 19 hours, about 20 hours, about 21 hours, about 22 hours, about 23 hours, about 24 hours, about 2 days, about 3 days, about 4 days, about 5 days, about 6 days, about 7 days, about 2 weeks, about 3 weeks, about 4 weeks, about 5 weeks, about 6 weeks, about 7 weeks, about 8 weeks, about 9 weeks, about 10 weeks, about 11 weeks, about 12 weeks, about 13 weeks, about 14 weeks, about 15 weeks, about 16 weeks, about 17 weeks, about 18 weeks, about 19 weeks, about 20 weeks, about 21 weeks, about 22 weeks, about 23 weeks, about 24 weeks, about 25 weeks, about 26 weeks, about 27 weeks, about 28 weeks, about 29 weeks, about 30 weeks, about 31 weeks, about 32 weeks, about 33 weeks, about 34 weeks, about 35 weeks, about 36 weeks, about 37 weeks, about 38 weeks, about 39 weeks, about 40 weeks, about 41 weeks, about 42 weeks, about 43 weeks, about 44 weeks, about 45 weeks, about 46 weeks, about 47 weeks, about 48 weeks, about 49 weeks, about 50 weeks, about 51 weeks, about 52 weeks, about 1.5 years, about 2 years, about 2.5 years, about 3.0 years, about 3.5 years, about 4.0 years, about 4.5 years, about 5.0 years, about 5.5. years, about 6.0 years, about 6.5 years, about 7.0 years, about 7.5 years, about 8.0 years, about 8.5 years, about 9.0 years, about 9.5 years or about 10.0 years), and the initial assay likewise generally is done within a longer time frame, e.g., about hours, days, months or years of the onset of the disease or condition.

[0380] Furthermore, the above assays can be performed using a first test sample obtained from a subject where the first test sample is obtained from one source, such as urine, serum or plasma. Optionally, the above assays can then be repeated using a second test sample obtained from the subject where the second test sample is obtained from another source. For example, if the first test sample was obtained from urine, the second test sample can be obtained from serum or plasma. The results obtained from the assays using the first test sample and the second test sample can be compared. The comparison can be used to assess the status of a disease or condition in the subject.

[0381] Moreover, the present disclosure also relates to methods of determining whether a subject predisposed to or suffering from a given disease, disorder or condition will benefit from treatment. In particular, the disclosure relates to analyte companion diagnostic methods and products. Thus, the method of “monitoring the treatment of disease in a subject” as described herein further optimally also can encompass selecting or identifying candidates for therapy.

[0382] Thus, in particular embodiments, the disclosure also provides a method of determining whether a subject having, or at risk for, a given disease, disorder or condition is a candidate for therapy. Generally, the subject is one who has experienced some symptom of a given disease, disorder or condition or who has actually been diagnosed as having, or being at risk for, a given disease, disorder or condition, and/or who demonstrates an unfavorable concentration or amount of analyte or a fragment thereof, as described herein.

[0383] The method optionally comprises an assay as described herein, where analyte is assessed before and following treatment of a subject with one or more pharmaceutical compositions (e.g., particularly with a pharmaceutical related to a mechanism of action involving analyte), with immunosuppressive therapy, or by immunoabsorption therapy, or where analyte is assessed following such treatment and the concentration or the amount of analyte is compared against a predetermined level. An unfavorable concentration of amount of analyte observed following treatment confirms that the subject will not benefit from receiving further or continued treatment, whereas a favorable concentration or amount of analyte observed following treatment confirms that the subject will benefit from receiving further or continued treatment. This confirmation assists with management of clinical studies, and provision of improved patient care.

[0384] It goes without saying that, while certain embodiments herein are advantageous when employed to assess a given disease, disorder or condition as discussed herein, the assays and kits can be employed to assess analyte in other diseases, disorders and conditions. The method of assay can also involve the assay of other markers and the like.

[0385] The method of assay also can be used to identify a compound that ameliorates a given disease, disorder or condition. For example, a cell that expresses analyte can be contacted with a candidate compound. The level of expression of analyte in the cell contacted with the compound can be compared to that in a control cell using the method of assay described herein.

### B. Kit

[0386] A kit for assaying a test sample for the presence, amount or concentration of an analyte (or a fragment thereof) in a test sample is also provided. The kit comprises at least one component for assaying the test sample for the analyte (or a fragment thereof) and instructions for assaying the test sample for the analyte (or a fragment thereof). The at least one component for assaying the test sample for the analyte (or a fragment thereof) can include a composition comprising an anti-analyte DVD-Ig (or a fragment, a variant, or a fragment of a variant thereof), which is optionally immobilized on a solid phase.

[0387] The kit can comprise at least one component for assaying the test sample for an analyte by immunoassay, e.g., chemiluminescent microparticle immunoassay, and instructions for assaying the test sample for an analyte by immunoassay, e.g., chemiluminescent microparticle immunoassay. For example, the kit can comprise at least one specific binding partner for an analyte, such as an anti-analyte, monoclonal/polyclonal antibody (or a fragment thereof that can bind to the analyte, a variant thereof that can bind to the analyte, or a fragment of a variant that can bind to the analyte) or an anti-analyte DVD-Ig (or a fragment, a variant, or a fragment of a variant thereof), either of which can be detectably labeled. Alternatively or additionally, the kit can comprise detectably labeled analyte (or a fragment thereof that can bind to an anti-analyte, monoclonal/polyclonal antibody or an anti-analyte DVD-Ig (or a fragment, a variant, or a fragment of a variant thereof)), which can compete with any analyte in a test sample for binding to an anti-analyte, monoclonal/polyclonal antibody (or a fragment thereof that can bind to the analyte, a variant thereof that can bind to the analyte, or a fragment of a variant that can bind to the analyte) or an anti-analyte DVD-Ig (or a fragment, a variant, or a fragment of a variant thereof), either of which can be immobilized on a solid support. The kit can comprise a calibrator or control, e.g., isolated or purified analyte. The kit can comprise at least one container (e.g., tube, microtiter plates or strips, which can be already coated with a first specific binding partner, for example) for conducting the assay, and/or a buffer, such as an assay buffer or a wash buffer, either one of which can be provided as a concentrated solution, a substrate solution for the detectable label (e.g., an enzymatic label), or a stop solution. Preferably, the kit comprises all components, i.e., reagents, standards, buffers, diluents, etc., which are necessary to perform the assay. The instructions can be in paper form or computer-readable form, such as a disk, CD, DVD, or the like.

[0388] Any antibodies, such as an anti-analyte antibody or an anti-analyte DVD-Ig, or tracer can incorporate a detectable label as described herein, such as a fluorophore, a radioactive moiety, an enzyme, a biotin/avidin label, a chromophore, a chemiluminescent label, or the like, or the kit can include reagents for carrying out detectable labeling. The antibodies, calibrators and/or controls can be provided in separate containers or pre-dispensed into an appropriate assay format, for example, into microtiter plates.

[0389] Optionally, the kit includes quality control components (for example, sensitivity panels, calibrators, and positive controls). Preparation of quality control reagents is well-known in the art and is described on insert sheets for a variety of immunodiagnostic products. Sensitivity panel members optionally are used to establish assay performance characteristics, and further optionally are useful indicators of the integrity of the immunoassay kit reagents, and the standardization of assays.

[0390] The kit can also optionally include other reagents required to conduct a diagnostic assay or facilitate quality control evaluations, such as buffers, salts, enzymes, enzyme co-factors, enzyme substrates, detection reagents, and the like. Other components, such as buffers and solutions for the isolation and/or treatment of a test sample (e.g., pretreatment reagents), also can be included in the kit. The kit can additionally include one or more other controls. One or more of the components of the kit can be lyophilized, in which case the kit can further comprise reagents suitable for the reconstitution of the lyophilized components.

[0391] The various components of the kit optionally are provided in suitable containers as necessary, e.g., a microtiter plate. The kit can further include containers for holding or storing a sample (e.g., a container or cartridge for a urine sample). Where appropriate, the kit optionally also can contain reaction vessels, mixing vessels, and other components that facilitate the preparation of reagents or the test sample. The kit can also include one or more instruments for assisting with obtaining a test sample, such as a syringe, pipette, forceps, measured spoon, or the like.

[0392] If the detectable label is at least one acridinium compound, the kit can comprise at least one acridinium-9-carboxamide, at least one acridinium-9-carboxylate aryl ester, or any combination thereof. If the detectable label is at least one acridinium compound, the kit also can comprise a source of hydrogen peroxide, such as a buffer, a solution, and/or at least one basic solution. If desired, the kit can contain a solid phase, such as a magnetic particle, bead, test tube, microtiter plate, cuvette, membrane, scaffolding molecule, film, filter paper, disc or chip.

### C. Adaptation of Kit and Method

[0393] The kit (or components thereof), as well as the method of determining the presence, amount or concentration of an analyte in a test sample by an assay, such as an immunoassay as described herein, can be adapted for use in a variety of automated and semi-automated systems (including those wherein the solid phase comprises a microparticle), as described, e.g., in U.S. Pat. Nos. 5,089,424 and 5,006,309, and as commercially marketed, e.g., by Abbott Laboratories (Abbott Park, Ill.) as ARCHITECT®.

[0394] Some of the differences between an automated or semi-automated system as compared to a non-automated system (e.g., ELISA) include the substrate to which the first specific binding partner (e.g., an anti-analyte, monoclonal/polyclonal antibody (or a fragment thereof, a variant thereof, or a fragment of a variant thereof) or an anti-analyte DVD-Ig (or a fragment thereof, a variant thereof, or a fragment of a variant thereof) is attached; either way, sandwich formation and analyte reactivity can be impacted), and the length and timing of the capture, detection and/or any optional wash steps. Whereas a non-automated format, such as an ELISA, may require a relatively longer incubation time with sample and capture reagent (e.g., about 2 hours), an automated or semi-automated format (e.g., ARCHITECT®, Abbott Laboratories) may have a relatively shorter incubation time (e.g., approximately 18 minutes for ARCHITECT®). Similarly, whereas a non-automated format, such as an ELISA, may incubate a detection antibody, such as the conjugate reagent, for a relatively longer incubation time (e.g., about 2 hours), an automated or semi-automated format (e.g., ARCHITECT®) may have a relatively shorter incubation time (e.g., approximately 4 minutes for the ARCHITECT®).

[0395] Other platforms available from Abbott Laboratories include, but are not limited to, AxSYM®, IMx® (see, e.g., U.S. Pat. No. 5,294,404, which is hereby incorporated by reference in its entirety), PRISM®, EIA (bead), and Quantum™ II, as well as other platforms. Additionally, the assays, kits and kit components can be employed in other formats, for example, on electrochemical or other hand-held or point-of-care assay systems. The present disclosure is, for example, applicable to the commercial Abbott Point of Care (1-STAT®, Abbott Laboratories) electrochemical immunoassay system that performs sandwich immunoassays. Immunosensors and their methods of manufacture and operation in single-use test devices are described, for example in, U.S. Pat. No. 5,063,081, U.S. Pat. App. Pub. No. 2003/0170881, U.S. Pat. App. Pub. No. 2004/0018577, U.S. Pat. App. Pub. No. 2005/0054078, and U.S. Pat. App. Pub. No. 2006/0160164, which are incorporated in their entireties by reference for their teachings regarding same.

[0396] In particular, with regard to the adaptation of an analyte assay to the I-STAT® system, the following configuration is preferred. A microfabricated silicon chip is manufactured with a pair of gold amperometric working electrodes and a silver-silver chloride reference electrode. On one of the working electrodes, polystyrene beads (0.2 mm diameter) with immobilized anti-analyte, monoclonal/polyclonal antibody (or a fragment thereof, a variant thereof, or a fragment of a variant thereof) or anti-analyte DVD-Ig (or a fragment thereof, a variant thereof, or a fragment of a variant thereof), are adhered to a polymer coating of patterned polyvinyl alcohol over the electrode. This chip is assembled into an I-STAT® cartridge with a fluidics format suitable for immunoassay. On a portion of the wall of the sample-holding chamber of the cartridge there is a layer comprising a specific binding partner for an analyte, such as an anti-analyte, monoclonal/polyclonal antibody (or a fragment thereof, a variant thereof, or a fragment of a variant thereof that can bind the analyte) or an anti-analyte DVD-Ig (or a fragment thereof, a variant thereof, or a fragment of a variant thereof that can bind the analyte), either of which can be detectably labeled. Within the fluid pouch of the cartridge is an aqueous reagent that includes p-aminophenol phosphate.

[0397] In operation, a sample suspected of containing an analyte is added to the holding chamber of the test cartridge, and the cartridge is inserted into the I-STAT® reader. After the specific binding partner for an analyte has dissolved into the sample, a pump element within the cartridge forces the sample into a conduit containing the chip. Here it is oscillated to promote formation of the sandwich. In the penultimate step of the assay, fluid is forced out of the pouch and into the conduit to wash the sample off the chip and into a waste chamber. In the final step of the assay, the alkaline phosphatase label reacts with p-aminophenol phosphate to cleave the phosphate group and permit the liberated p-aminophenol to be electrochemically oxidized at the working electrode. Based on the measured current, the reader is able to calculate the amount of analyte in the sample by means of an embedded algorithm and factory-determined calibration curve.

[0398] It further goes without saying that the methods and kits as described herein necessarily encompass other reagents and methods for carrying out the immunoassay. For instance, encompassed are various buffers such as are known in the art and/or which can be readily prepared or optimized to be employed, e.g., for washing, as a conjugate diluent, microparticle diluent, and/or as a calibrator diluent. An exemplary conjugate diluent is ARCHITECT® conjugate diluent employed in certain kits (Abbott Laboratories, Abbott Park, Ill.) and containing 2-(N-morpholino)ethanesulfonic acid (MES), a salt, a protein blocker, an antimicrobial agent, and a detergent. An exemplary calibrator diluent is ARCHITECT® human calibrator diluent employed in certain kits (Abbott Laboratories, Abbott Park, Ill.), which comprises a buffer containing MES, other salt, a protein blocker, and an antimicrobial agent. Additionally, as described in U.S. Patent Application No. 61/142,048 filed Dec. 31, 2008, improved signal generation may be obtained, e.g., in an I-Stat cartridge format, using a nucleic acid sequence linked to the signal antibody as a signal amplifier.

[0399] It will be readily apparent to those skilled in the art that other suitable modifications and adaptations of the methods described herein are obvious and may be made using suitable equivalents without departing from the scope of the invention or the embodiments disclosed herein. Having now described certain embodiments of the present invention in detail, the same will be more clearly understood by reference to the following examples, which are included for purposes of illustration only and are not intended to be limiting of the invention.

### EXEMPLIFICATION

### Example 1

### Design, Construction, and Analysis of a DVD-Ig

### Example 1.1

### Assays Used to Identify and Characterize Parent Antibodies and DVD-Ig

[0400] The following assays were used throughout the Examples to identify and characterize parent antibodies and DVD-Ig, unless otherwise stated.

### Example 1.1.1

### Assays Used To Determine Binding and Affinity of Parent Antibodies and DVD-Ig for Their Target Antigen(s)

### Example 1.1.1.A

### Direct Bind ELISA

[0401] Enzyme Linked Immunosorbent Assays to screen for antibodies that bind a desired target antigen were performed as follows. High bind ELISA plates (Corning Costar #3369, Acton, Mass.) were coated with 100 μL/well of 10 μg/ml of desired target antigen (R&D Systems, Minneapolis, Minn.) or desired target antigen extra-cellular domain/FC fusion protein (R&D Systems, Minneapolis, Minn.) or monoclonal mouse anti-polyHistidine antibody (R&D Systems # MAB050, Minneapolis, Minn.) in phosphate buffered saline (10×PBS, Abbott Bioresearch Center, Media Prep# MPS-073, Worcester, Mass.) overnight at 4° C. Plates were washed four times with PBS containing 0.02% Tween 20. Plates were blocked by the addition of 300 μL/well blocking solution (non-fat dry milk powder, various retail suppliers, diluted to 2% in PBS) for ½ hour at room temperature. Plates were washed four times after blocking with PBS containing 0.02% Tween 20.

[0402] Alternatively, one hundred microliters per well of 10 μg/ml of Histidine (H is) tagged desired target antigen (R&D Systems, Minneapolis, Minn.) was added to ELISA plates coated with monoclonal mouse anti-polyHistidine antibody as described above and incubated for 1 hour at room temperature. Wells were washed four times with PBS containing 0.02% Tween 20.

[0403] One hundred microliters of antibody or DVD-Ig preparations diluted in blocking solution as described above was added to the desired target antigen plate or desired target antigen/FC fusion plate or the anti-polyHistidine antibody/His tagged desired target antigen plate prepared as described above and incubated for 1 hour at room temperature. Wells were washed four times with PBS containing 0.02% Tween 20.

[0404] One hundred microliters of 10 ng/mL goat anti-human IgG-FC specific HRP conjugated antibody (Southern Biotech #2040-05, Birmingham, Ala.) was added to each well of the desired target antigen plate or anti-polyHistidine antibody/Histidine tagged desired target antigen plate. Alternatively, one hundred microliters of 10 ng/mL goat anti-human IgG-kappa light chain specific HRP conjugated antibody (Southern Biotech #2060-05 Birmingham, Ala.) was added to each well of the desired target antigen/FC fusion plate and incubated for 1 hour at room temperature. Plates were washed 4 times with PBS containing 0.02% Tween 20.

[0405] One hundred microliters of enhanced TMB solution (Neogen Corp. #308177, K Blue, Lexington, Ky.) was added to each well and incubated for 10 minutes at room temperature. The reaction was stopped by the addition of 50 μL1N sulphuric acid. Plates were read spectrophotometrically at a wavelength of 450 nm.

[0406] In the Direct Bind ELISA, binding was sometimes not observed, probably because the antibody binding site on the target antigen was either “masked” or the antigen is “distorted” when coated to the plastic surface. The inability of a DVD-Ig to bind its target may also be due to steric limitation imposed on DVD-Ig by the Direct Bind ELISA format. The parent antibodies and DVD-Igs that did not bind in the Direct Bind ELISA format bound to target antigen in other ELISA formats, such as FACS, Biacore or bioassay. Non-binding of a DVD-Ig was also restored by adjusting the linker length between the two variable domains of the DVD-Ig, as shown previously.

### Example 1.1.1.B

### Capture ELISA

[0407] ELISA plates (Nunc, MaxiSorp, Rochester, N.Y.) are incubated overnight at 4° C. with anti-human Fc antibody (5 μg/ml in PBS, Jackson Immunoresearch, West Grove, Pa.). Plates are washed three times in washing buffer (PBS containing 0.05% Tween 20), and blocked for 1 hour at 25° C. in blocking buffer (PBS containing 1% BSA). Wells are washed three times, and serial dilutions of each antibody or DVD-Ig in PBS containing 0.1% BSA are added to the wells and incubated at 25° C. for 1 hour. The wells are washed three times, and biotinylated antigen (2 nM) is added to the plates and incubated for 1 hour at 25° C. The wells are washed three times and incubated for 1 hour at 25° C. with streptavidin-HRP (KPL #474-3000, Gaithersburg, Md.). The wells are washed three times, and 100 μl of ULTRA-TMB ELISA (Pierce, Rockford, Ill.) is added per well. Following color development the reaction is stopped with 1N HCL and absorbance at 450 nM is measured. Results are shown in Table 3.

### Example 1.1.1.C

### Affinity Determination Using BIACORE Technology

TABLE 3
Reagent Used in Biacore Analyses

| Assay | Antigen | Vendor Designation | Vendor | Catalog # |
|---|---|---|---|---|
| | NGF | Recombinant Human | R&D systems | 256-GF |
| | | β-NGF | | |
| | EGFR | Recombinant Human | R&D systems | 1095-ER |
| | | EGF R/ErbB1 | | |
| | VEGF | Recombinant Human | R&D systems | 293-VE/CF |
| | | VEGF 165 | | |
| | DLL4 | Recombinant Human | R&D systems | 1506-D4/CF |
| | | DLL4 | | |
| | PlGF | Recombinant Human | R&D systems | 264-PG/CF |
| | | PlGF | | |
| | RON | Recombinant Human | R&D systems | 1947-MS |
| | | MSP R/Ron | | |
| | ErbB3 | Recombinant Human | R&D systems | 348-RB |
| | | ErbB3/HER3 Fc | | |
| | | Chimera | | |

ECD = Extracellular Domain/
FC = antigen/IgG FC domain fusion protein

### BIACORE Methods:

[0409] The BIACORE assay (Biacore, Inc, Piscataway, N.J.) determines the affinity of antibodies or DVD-Ig with kinetic measurements of on-rate and off-rate constants. Binding of antibodies or DVD-Ig to a target antigen (for example, a purified recombinant target antigen) was determined by surface plasmon resonance-based measurements with a Biacore® 1000 or 3000 instrument (Biacore® AB, Uppsala, Sweden) using running HBS-EP (10 mM HEPES [pH 7.4], 150 mM NaCl, 3 mM EDTA, and 0.005% surfactant P20) at 25° C. All chemicals were obtained from Biacore® AB (Uppsala, Sweden) or otherwise from a different source as described in the text. For example, approximately 5000 RU of goat anti-mouse IgG, (Fcγ), fragment specific polyclonal antibody (Pierce Biotechnology Inc, Rockford, Ill.) diluted in 10 mM sodium acetate (pH 4.5) was directly immobilized across a CM5 research grade biosensor chip using a standard amine coupling kit according to manufacturer's instructions and procedures at 25 μg/ml. Unreacted moieties on the biosensor surface were blocked with ethanolamine. Modified carboxymethyl dextran surface in flowcell 2 and 4 was used as a reaction surface. Unmodified carboxymethyl dextran without goat anti-mouse IgG in flow cell 1 and 3 was used as the reference surface. For kinetic analysis, rate equations derived from the 1:1 Langmuir binding model were fitted simultaneously to association and dissociation phases of all eight injections (using global fit analysis) with the use of Biaevaluation 4.0.1 software. Purified antibodies or DVD-Ig were diluted in HEPES-buffered saline for capture across goat anti-mouse IgG specific reaction surfaces. Antibodies or DVD-Ig to be captured as a ligand (25 μg/ml) were injected over reaction matrices at a flow rate of 5 μl/min. The association and dissociation rate constants, kₒₙ (M⁻¹s⁻¹) and k_{off} (s⁻¹) were determined under a continuous flow rate of 25 μl/min. Rate constants were derived by making kinetic binding measurements at different antigen concentrations ranging from 10-200 nM. The equilibrium dissociation constant (M) of the reaction between antibodies or DVD-Igs and the target antigen was then calculated from the kinetic rate constants by the following formula: K_{D}=k_{off}/kₒₙ. Binding was recorded as a function of time and kinetic rate constants were calculated. In this assay, on-rates as fast as 10⁶M⁻¹s¹ and off-rates as slow as 10⁻⁶ s⁻¹ can be measured. Results are shown in Table 4.

TABLE 4
BIACORE Analysis of Parental Antibodies and DVD Constructs

| Parent | N-Termi- | C-Termi- | | | |
|---|---|---|---|---|---|
| Antibody | nal | nal | | | |
| or | Variable | Variable | | | |
| DVD-Ig | Domain | Domain | kₒₙ | k_{off} | K_{D} |
| ID | (VD) | (VD) | (M−1s−1) | (s−1) | (M) |
| AB118 | NGF (seq. 2) | | 5.40E+06 | 5.40E−05 | 1.00E−11 |
| AB033 | EGFR (seq. 2) | | 7.93+04 | 1.39E−03 | 1.75E−08 |
| DVD1312 | EGFR | | 1.40E+06 | 1.60E−03 | 1.10E−09 |
| | (seq. 2) | | | | |
| DVD1312 | | NGF | 1.50E+05 | <1E−06 | <6.7E−12 |
| | | (seq. 2) | | | |
| AB118 | NGF (seq. 2) | | 5.40E+06 | 5.40E−05 | 1.00E−11 |
| AB063 | ErbB3 (seq. 2) | | 8.66E+04 | 1.17E−04 | 1.36E−09 |
| DVD1320 | ErbB3 | | 2.40E+05 | <1E−06 | <4.2E−12 |
| | (seq. 2) | | | | |
| DVD1320 | | NGF | 2.00E+05 | 2.80E−04 | 1.40E−09 |
| | | (seq. 2) | | | |
| AB118 | NGF (seq. 2) | | 5.40E+06 | 5.40E−05 | 1.00E−11 |
| DVD1323 | NGF | IGF1R | 5.00E+06 | 2.40E−05 | 4.83E−12 |
| | (seq. 2) | | | | |
| DVD1324 | IGF1R | NGF | 7.40E+05 | 4.20E−06 | 5.60E−12 |
| | | (seq. 2) | | | |
| AB118 | NGF (seq. 2) | | 5.40E+06 | 5.40E−05 | 1.00E−11 |
| DVD1326 | HGF | NGF | 5.40E+05 | 1.00E−06 | 1.90E−12 |
| | | (seq. 2) | | | |
| AB118 | NGF (seq. 2) | | 5.40E+06 | 5.40E−05 | 1.00E−11 |
| AB014 | VEGF (seq. 1) | | 1.47E+05 | 3.03E−05 | 2.07E−10 |
| DVD1327 | NGF | | 6.10E+04 | 1.10E−04 | 1.80E−09 |
| | (seq. 2) | | | | |
| DVD1327 | | VEGF | 5.20E+06 | 1.70E−05 | 3.20E−12 |
| | | (seq. 1) | | | |
| DVD1328 | VEGF | | 9.60E+05 | 7.70E−05 | 8.00E−11 |
| | (seq. 1) | | | | |
| DVD1328 | | NGF | 1.80E+05 | <1E−06 | <5.4E−12 |
| | | (seq. 2) | | | |
| AB118 | NGF (seq. 2) | | 5.40E+06 | 5.40E−05 | 1.00E−11 |
| AB015 | DLL4 | | 4.00E+05 | 1.66E−04 | 4.14E−10 |
| DVD1330 | DLL4 | | 5.20E+05 | 2.00E−04 | 3.80E−10 |
| DVD1330 | | NGF | 6.60E+05 | 1.20E−06 | 1.80E−12 |
| | | (seq. 2) | | | |
| AB118 | NGF (seq. 2) | | 5.40E+06 | 5.40E−05 | 1.00E−11 |
| AB047 | PlGF | | 3.80E+06 | 1.08E−04 | 2.82E−11 |
| DVD1331 | NGF | | 3.80E+05 | 1.10E−04 | 3.00E−10 |
| | (seq. 2) | | | | |
| DVD1331 | | PlGF | 2.00E+05 | 2.80E−04 | 1.40E−09 |
| DVD1332 | PlGF | | 3.00E+06 | 1.70E−04 | 5.50E−11 |
| DVD1332 | | NGF | 1.49E+05 | <1E−06 | <6.7E−12 |
| | | (seq. 2) | | | |
| AB118 | NGF (seq. 2) | | 5.40E+06 | 5.40E−05 | 1.00E−11 |
| AB005 | RON | | 3.66E+04 | 7.39E−04 | 2.02E−08 |
| DVD1334 | RON | | 1.20E+06 | 6.70E−03 | 5.70E−09 |
| DVD1334 | | NGF | 1.90E+05 | 1.20E−06 | 6.20E−12 |
| | | (seq. 2) | | | |
| AB118 | NGF (seq. 2) | | 5.40E+06 | 5.40E−05 | 1.00E−11 |
| DVD1336 | CD-20 | NGF | 6.30E+04 | <1E−06 | <1.6E−11 |
| | | (seq. 2) | | | |
| AB118 | NGF (seq. 2) | | 5.40E+06 | 5.40E−05 | 1.00E−11 |
| DVD1349 | NGF | C-Met | 1.80E+06 | <1E−06 | <5.3E−13 |
| | (seq. 2) | | | | |
| AB118 | NGF (seq. 2) | | 5.40E+06 | 5.40E−05 | 1.00E−11 |
| DVD1369 | NGF | | — | — | — |
| | (seq. 2) | | | | |
| DVD1369 | | EGFR | 4.10E+05 | <1E−6 | <2.4E−12 |
| | | (seq. 3) | | | |
| DVD1370 | EGFR | | 1.10E+05 | <1E−6 | <9.1E−12 |
| | (seq. 3) | | | | |
| DVD1370 | | NGF | — | — | — |
| | | (seq. 2) | | | |

Binding of all DVD-Ig constructs characterized by Biacore technology was maintained and comparable to that of the parental antibody.

### Example 1.1.2

### Assays Used to Determine the Functional Activity of Parent Antibodies and DVD-Ig

### Example 1.1.2.A

### Cytokine Bioassay

[0410] The ability of an anti-cytokine or an anti-growth factor parent antibody or DVD-Ig containing anti-cytokine or anti-growth factor sequences to inhibit or neutralize a target cytokine or growth factor bioactivity is analyzed by determining the inhibitory potential of the antibody or DVD-Ig. For example, the ability of an anti-IL-4 antibody to inhibit IL-4 mediated IgE production may be used. For example, human naive B cells are isolated from peripheral blood, respectively, buffy coats by Ficoll-paque density centrifugation, followed by magnetic separation with MACS beads (Miltenyi Biotec, Bergisch Gladbach, Germany) specific for human sIgD FITC labeled goat F(ab)₂ antibodies followed by anti-FITC MACS beads. Magnetically sorted naive B cells are adjusted to 3×10⁵ cells per ml in XV15 and plated out in 100 μl per well of 96-well plates in a 6×6 array in the center of the plate, surrounded by PBS filled wells during the 10 days of culture at 37° C. in the presence of 5% CO₂. One plate each is prepared per antibody to be tested, consisting of 3 wells each of un-induced and induced controls and quintuplicate repeats of antibody titrations starting at 7 μg/ml and running in 3-fold dilution down to 29 ng/ml final concentrations added in 50 μl four times concentrated pre-dilution. To induce IgE production, rhIL-4 at 20 ng/ml plus anti-CD40 monoclonal antibody (Novartis, Basel, Switzerland) at 0.5 μg/ml final concentrations in 50 μl each are added to each well, and IgE concentrations are determined at the end of the culture period by a standard sandwich ELISA method.

### Example 1.1.2.B

### Cytokine Release Assay

[0411] The ability of a parent antibody or DVD-Ig to cause cytokine release is analyzed. Peripheral blood is withdrawn from three healthy donors by venipuncture into heparized vacutainer tubes. Whole blood is diluted 1:5 with RPMI-1640 medium and placed in 24-well tissue culture plates at 0.5 mL per well. The anti-cytokine antibodies (e.g., anti-IL-4) are diluted into RPMI-1640 and placed in the plates at 0.5 mL/well to give final concentrations of 200, 100, 50, 10, and 1 μg/mL. The final dilution of whole blood in the culture plates is 1:10. LPS and PHA are added to separate wells at 2 μg/mL and 5 μg/mL final concentration as a positive control for cytokine release. Polyclonal human IgG is used as negative control antibody. The experiment is performed in duplicate. Plates are incubated at 37° C. at 5% CO₂. Twenty-four hours later the contents of the wells are transferred into test tubes and spun for 5 minutes at 1200 rpm. Cell-free supernatants are collected and frozen for cytokine assays. Cells left over on the plates and in the tubes are lysed with 0.5 mL of lysis solution, and placed at −20° C. and thawed. 0.5 mL of medium is added (to bring the volume to the same level as the cell-free supernatant samples) and the cell preparations are collected and frozen for cytokine assays. Cell-free supernatants and cell lysates are assayed for cytokine levels by ELISA, for example, for levels of IL-8, IL-6, IL-1β, IL-1RA, or TNF-α.

### Example 1.1.2.C

### Cytokine Cross-Reactivity Study

[0412] The ability of an anti-cytokine parent antibody or DVD-Ig directed to a cytokine(s) of interest to cross react with other cytokines is analyzed. Parent antibodies or DVD-Ig are immobilized on a Biacore biosensor matrix. An anti-human Fc mAb is covalently linked via free amine groups to the dextran matrix by first activating carboxyl groups on the matrix with 100 mM N-hydroxysuccinimide (NHS) and 400 mM N-Ethyl-N′-(3-dimethylaminopropyl)-carbodiimide hydrochloride (EDC). Approximately 50 μL of each antibody or DVD-Ig preparation at a concentration of 25 μg/mL, diluted in sodium acetate, pH 4.5, is injected across the activated biosensor and free amines on the protein are bound directly to the activated carboxyl groups. Typically, 5000 Resonance Units (RU's) are immobilized. Unreacted matrix EDC-esters are deactivated by an injection of 1 M ethanolamine. A second flow cell is prepared as a reference standard by immobilizing human IgG1/K using the standard amine coupling kit. SPR measurements are performed using the CM biosensor chip. All antigens to be analyzed on the biosensor surface are diluted in HBS-EP running buffer containing 0.01% P20.

[0413] To examine the cytokine binding specificity, excess cytokine of interest (100 nM, e.g., soluble recombinant human) is injected across the anti-cytokine parent antibody or DVD-Ig immobilized biosensor surface (5 minute contact time). Before injection of the cytokine of interest and immediately afterward, HBS-EP buffer alone flows through each flow cell. The net difference in the signals between the baseline and the point corresponding to approximately 30 seconds after completion of cytokine injection are taken to represent the final binding value. Again, the response is measured in Resonance Units. Biosensor matrices are regenerated using 10 mM HCl before injection of the next sample where a binding event is observed, otherwise running buffer was injected over the matrices. Human cytokines (e.g., IL-1α, IL-1β, IL-2, IL-3, IL-4, IL-5, IL-6, IL-7, IL-8, IL-9, IL-10, IL-11, IL-12, IL-13, IL-15, IL-16, IL-17, IL-18, IL-19, IL-20, IL-22, IL-23, IL-27, TNF-α, TNF-β, and IFN-γ, for example) are also simultaneously injected over the immobilized mouse IgG1/K reference surface to record any nonspecific binding background. By preparing a reference and reaction surface, Biacore can automatically subtract the reference surface data from the reaction surface data in order to eliminate the majority of the refractive index change and injection noise. Thus, it is possible to ascertain the true binding response attributed to an anti-cytokine antibody or DVD-Ig binding reaction.

[0414] When a cytokine of interest is injected across immobilized anti-cytokine antibody, significant binding is observed. 10 mM HCl regeneration completely removes all non-covalently associated proteins. Examination of the sensorgram shows that immobilized anti-cytokine antibody or DVD-Ig binding to soluble cytokine is strong and robust. After confirming the expected result with the cytokine of interest, the panel of remaining recombinant human cytokines is tested, for each antibody or DVD-Ig separately. The amount of anti-cytokine antibody or DVD-Ig bound or unbound cytokine for each injection cycle is recorded. The results from three independent experiments are used to determine the specificity profile of each antibody or DVD-Ig. Antibodies or DVD-Ig with the expected binding to the cytokine of interest and no binding to any other cytokine are selected.

### Example 1.1.2.D

### Tissue Cross Reactivity

[0415] Tissue cross reactivity studies are done in three stages, with the first stage including cryosections of 32 tissues, second stage including up to 38 tissues, and the 3^{rd} stage including additional tissues from 3 unrelated adults as described below. Studies are done typically at two dose levels.

[0416] Stage 1: Cryosections (about 5 gm) of human tissues (32 tissues (typically: Adrenal Gland, Gastrointestinal Tract, Prostate, Bladder, Heart, Skeletal Muscle, Blood Cells, Kidney, Skin, Bone Marrow, Liver, Spinal Cord, Breast, Lung, Spleen, Cerebellum, Lymph Node, Testes, Cerebral Cortex, Ovary, Thymus, Colon, Pancreas, Thyroid, Endothelium, Parathyroid, Ureter, Eye, Pituitary, Uterus, Fallopian Tube and Placenta) from one human donor obtained at autopsy or biopsy) are fixed and dried on object glass. The peroxidase staining of tissue sections is performed, using the avidin-biotin system.

[0417] Stage 2: Cryosections (about 5 μm) of human tissues 38 tissues (including adrenal, blood, blood vessel, bone marrow, cerebellum, cerebrum, cervix, esophagus, eye, heart, kidney, large intestine, liver, lung, lymph node, breast mammary gland, ovary, oviduct, pancreas, parathyroid, peripheral nerve, pituitary, placenta, prostate, salivary gland, skin, small intestine, spinal cord, spleen, stomach, striated muscle, testis, thymus, thyroid, tonsil, ureter, urinary bladder, and uterus) from 3 unrelated adults obtained at autopsy or biopsy) are fixed and dried on object glass. The peroxidase staining of tissue sections is performed, using the avidin-biotin system.

[0418] Stage 3: Cryosections (about 5 gm) of cynomolgus monkey tissues (38 tissues (including adrenal, blood, blood vessel, bone marrow, cerebellum, cerebrum, cervix, esophagus, eye, heart, kidney, large intestine, liver, lung, lymph node, breast mammary gland, ovary, oviduct, pancreas, parathyroid, peripheral nerve, pituitary, placenta, prostate, salivary gland, skin, small intestine, spinal cord, spleen, stomach, striated muscle, testis, thymus, thyroid, tonsil, ureter, urinary bladder, and uterus) from 3 unrelated adult monkeys obtained at autopsy or biopsy) are fixed and dried on object glass. The peroxidase staining of tissue sections is performed, using the avidin-biotin system.

[0419] The antibody or DVD-Ig is incubated with the secondary biotinylated anti-human IgG and developed into immune complex. The immune complex at the final concentrations of 2 and 10 μg/mL of antibody or DVD-Ig is added onto tissue sections on object glass and then the tissue sections are reacted for 30 minutes with a avidin-biotin-peroxidase kit. Subsequently, DAB (3,3′-diaminobenzidine), a substrate for the peroxidase reaction, is applied for 4 minutes for tissue staining. Antigen-Sepharose beads are used as positive control tissue sections. Target antigen and human serum blocking studies serve as additional controls. The immune complex at the final concentrations of 2 and 10 μg/mL of antibody or DVD-Ig is pre-incubated with target antigen (final concentration of 100 gg/ml) or human serum (final concentration 10%) for 30 minutes, and then added onto the tissue sections on object glass and then the tissue sections are reacted for 30 minutes with a avidin-biotin-peroxidase kit. Subsequently, DAB (3,3′-diaminobenzidine), a substrate for the peroxidase reaction, is applied for 4 minutes for tissue staining.

[0420] Any specific staining is judged to be either an expected (e.g., consistent with antigen expression) or unexpected reactivity based upon known expression of the target antigen in question. Any staining judged specific is scored for intensity and frequency. The tissue staining between stage 2 (human tissue) and stage 3 (cynomolgus monkey tissue) is either judged to be similar or different.

### Example 1.1.2.E

### IL-1a/13 Bioassay and Neutralization Assay

[0421] MRC5 cells were plated at 1.5−2×10⁴ cells per well in a 100 μL volume and incubated overnight at 37° C., 5% CO₂. A 20 μg/mL working stock of antibody (4× concentrated) was prepared in complete MEM medium. An eight point serial dilution was performed (5 μg/mL-0.0003 μg/mL) in complete MEM in Marsh dilution plates. Sixty-five μL/well of each antibody dilution was added in quadruplicate to a 96 well v-bottom (Costar#3894) plate and 65 μL of a 200 pg/mL solution of IL-1α or IL-1β or 65 μL of a mixed solution containing a 50 pg/mL solution of both IL-1α and IL-1β was also added. Control wells received 65 μL 200 pg/ml of IL-1α or IL-1β or 50 pg/mL mixed IL-1α/β (4× concentrated) plus 65 μL. MEM media and media control wells received 130 μL of media. Following a 1 hour incubation, 100 μL of the Ab/Ag mixture was added to the MRCS cells. All well volumes were equal to 200 μL. All plate reagents were then 1× concentrated. After a 16-20 hour incubation, the well contents (150 μL) were transferred into a 96-well round bottom plate (Costar#3799) and placed in a ˜20° C. freezer. The supernatants were tested for hIL-8 levels by using a human IL-8 ELISA kit (R&D Systems, Minneapolis, Minn.) or hIL-8 chemiluminescence kit (MDS). Neutralization potency was determined by calculating percent inhibition relative to the IL-1α, IL-1β, or the IL-1α/β alone control value.

### Example 1.1.2.F

### Neutralization of huTNFα

[0422] L929 cells were grown to a semi-confluent density and harvested using 0.05% tryspin (Gibco#25300). The cells were washed with PBS, counted and resuspended at 1E6 cells/mL in assay media containing 4 μg/mL actinomycin D. The cells were seeded in a 96-well plate (Costar#3599) at a volume of 50 μL and 5E4 cells/well. The DVD-Ig™ and control IgG were diluted to a 4× concentration in assay media and serial 1:3 dilutions were performed. The huTNFα was diluted to 400 pg/mL in assay media. Antibody sample (200 μL) was added to the huTNFα (200 μL) in a 1:2 dilution scheme and allowed to incubate for 0.5 hour at room temperature.

[0423] The DVD-Ig™/huTNFα solution was added to the plated cells at 100 μL for a final concentration of 100 pg/mL huTNFα and 25 nM-0.00014 nM DVD-Ig™. The plates were incubated for 20 hour at 37° C., 5% CO₂. To quantitate viability, 100 μL was removed from the wells and 10 μL of WST-1 reagent (Roche cat#11644807001) was added. Plates were incubated under assay conditions for 3.5 hours, centrifuged at 500×g and 75 μL supernatant transferred to an ELISA plate (Costar cat#3369). The plates were read at OD 420-600 nm on a Spectromax 190 ELISA plate reader.

### Example 1.1.2.G

### IL-6 Induced pSTAT3 Assay

[0424] TF-1 cells are cultured in DMEM with 2 mM 1-glutamine, 10 mM HEPES, 100 U/mL Pen/strep, 1.5 g/L sodium bicarbonate, 4.5 g/L glucose, 1 mM sodium pyruvate, 10% FBS, and 2 ng/mL GM-CSF. TF-1 cells are plated at 1.5−2×10⁵ cells per well in a 10 μL volume and incubated overnight at 37° C., 5% CO₂ in assay medium. (complete DMEM minus GM-CSF). Cells are plated into a 96½ well white assay plate. A 500 μg/mL working stock of antibody (4× concentrated) is prepared in PBS. Antibodies and DVD-Igs are serial diluted 1:5 in assay medium in Marsh dilution plates. Five uL/well of each antibody dilution is added in triplicate to the 96½ well white assay plate containing the cells. Cells and antibodies or DVD-Igs are pre-incubated for 30 minutes on ice. IL-6 is prepared at 10 μg/mL stock in endotoxin free D-PBS (0.1% BSA) and a working stock of 100 ng/mL (4× concentration) prepared with assay media. Five μL/well of the 100 ng/mL IL-6 is added to each well. Plates are incubated for 30 minutes at 37° C. Cells are lysed by adding 5 μL of 5× cell lysis buffer to all wells and the plates are shaken for 10 minutes at room temperature. Plates are frozen at −20° C. and the pSTAT3 SureFire Assay was run (Perkin Elmer).

[0425] The plate is thawed at room temperature and 30 μL/well of Reaction Buffer plus Activation Buffer mix containing Alpha Screen Acceptor Beeds (40 parts reaction buffer, 10 parts activation buffer and 1 part acceptor beads) is added to each well. The plate is sealed with foil to protect it from light and is agitated gently for 2 hours at 37° C. Dilution buffer (12.5 μL/well) containing Alpha Screen Donor beads (20 parts dilution buffer to 1 part donor beads) is added to each well. The plate is sealed with foil and agitated gently for 2 hours at 37° C. The plate is brought to room temperature and read on the Alpha Screen plate reader.

### Example 1.1.2.H

### Growth Inhibitory Effect of a Tumor Receptor Monoclonal Antibody or DVD-Igs In Vitro

[0426] Tumor receptor monoclonal antibodies or DVD-Igs diluted in D-PBS-BSA (Dulbecco's phosphate buffered saline with 0.1% BSA) 20mL are added to human tumor cells at final concentrations of 0.01 μg/mL-100 μg/mL in 180 uL. The plates are incubated at 37° C. in a humidified, 5% CO₂ atmosphere for 3 days. The number of live cells in each well is quantified using MTS reagents according to the manufacturer's instructions (Promega, Madison, Wis.) to determine the percent of tumor growth inhibition. Wells without antibody treatment are used as controls of 0% inhibition whereas wells without cells are considered to show 100% inhibition.

### Example 1.1.2.1

### Inhibition of NGF in TF-1 Cell Proliferation Bioassay

[0427] TF-1 cells were cultured in RPMI 1640 (Invitrogen)+10% Fetal Bovine Serum (Hyclone)+L-glutamine (Invitrogen)+rhu GM-CSF (R&D Systems). TF-1 cells were serum starved 24 hours in RPMI 1640+L-glutamine at 1×10⁵ cells per mL and incubated overnight at 37° C., 5% CO₂. The day of the experiment TF-1 cells were plated in opaque walled 96-well plates at 2.5×10⁴ cells per well in a 100 μL volume+assay media (RPMI-1640+L-glutamine+4% FBS) The cells were stimulated by adding DVD-Ig or antibody to the cells. The DVD-Ig™ and control IgG were diluted to a 4× concentration in assay media and serial 1:5 dilutions were performed. The huNGF was diluted to 8 ng/mL in assay media. The DVD-Ig™ (50 μl) and huNGF (50 μL) solutions were added to the plated for a final concentration of 2 ng/mL huNGF and 25 nM-0.000003 nM DVD-Ig™. The plates were incubated for 72 hour at 37° C., 5% CO₂. To quantitate viability, the Cell Titer Glo kit (Promega cat# TB288) was used (100 μl of solution added to each well following manufacturer's instructions). The plates were read using luminescence on a Spectromax 190 ELISA plate reader.

TABLE 5
NGF Inhibition Assay With NGF Parent
Antibodies and DVD-Ig Constructs

| Parent | | | N-Terminal | C-Terminal |
|---|---|---|---|---|
| Antibody | N-Terminal | C-Terminal | VD NGF | VD NGF |
| or | Variable | Variable | Inhibition | Inhibition |
| DVD-Ig | Domain | Domain | Assay | Assay |
| ID | (VD) | (VD) | EC50 nM | EC50 nM |
| AB118 | NGF(seq 2) | | 0.0060 | |
| DVD1311 | NGF (seq. 2) | EGFR (seq 2) | 0.0009 | — |
| DVD1312 | EGFR (seq. 2) | NGF (seq. 2) | — | 0.0060 |
| DVD1313 | NGF (seq. 2) | IGF1, 2 | 0.0009 | — |
| DVD1314 | IGF1, 2 | NGF (seq. 2) | — | 0.0003 |
| DVD1315 | NGF (seq. 2) | RON (seq. 1) | 0.0022 | — |
| DVD1316 | RON (seq. 1) | NGF (seq. 2) | — | 0.8735 |
| DVD1317 | NGF (seq. 2) | ErbB3 (seq. 1) | 0.0011 | — |
| DVD1318 | ErbB3 (seq. 1) | NGF (seq. 2) | — | 0.0534 |
| DVD1319 | NGF (seq. 2) | ErbB3 (seq. 2) | 0.0141 | — |
| DVD1320 | ErbB3 (seq. 2) | NGF (seq. 2) | — | 0.0294 |
| DVD1324 | IGF1R | NGF (seq. 2) | — | 0.0019 |
| DVD1326 | HGF | NGF (seq. 2) | — | 1.3610 |
| DVD1327 | NGF (seq. 2) | VEGF (seq. 1) | 0.0191 | — |
| DVD1328 | VEGF (seq. 1) | NGF (seq. 2) | — | 0.4311 |
| DVD1330 | DLL4 | NGF (seq. 2) | — | 0.1362 |
| DVD1331 | NGF (seq. 2) | PlGF | 0.0065 | — |
| DVD1332 | PlGF | NGF (seq. 2) | — | 1.3530 |
| DVD1333 | NGF (seq. 2) | RON (seq. 2) | 0.0006 | — |
| DVD1334 | RON (seq. 2) | NGF (seq. 2) | — | 0.1746 |
| DVD1335 | NGF (seq. 2) | CD-20 | 0.0003 | — |
| DVD1336 | CD-20 | NGF (seq. 2) | — | 0.1475 |
| DVD1337 | NGF (seq. 2) | EGFR (seq. 1) | 0.0170 | — |
| DVD1338 | EGFR (seq. 1) | NGF (seq. 2) | — | 1.2730 |
| DVD1339 | NGF (seq. 2) | HER2 | 0.0006 | — |
| DVD1340 | HER2 | NGF (seq. 2) | — | 0.0103 |
| DVD1351 | NGF (seq. 2) | NRP1 (seq 1) | 0.0051 | — |
| DVD1352 | NRP1 (seq 1) | NGF (seq. 2) | — | 0.2259 |
| DVD1362 | ErbB3 (seq. 3) | NGF (seq. 2) | — | 0.0025 |
| DVD1369 | NGF (seq. 2) | EGFR (seq. 3) | 0.0056 | — |
| DVD1370 | EGFR (seq. 3) | NGF (seq. 2) | — | 5.9570 |

[0428] All DVD-Igs containing VDs from AB118 in either the N-terminal or C-terminal position showed neutralization in the NGF inhibition assay.

### Example 1.1.2.J

### Tumoricidal Effect of A Parent or DVD-Ig Antibody In Vitro

[0429] Parent antibodies or DVD-Ig that bind to target antigens on tumor cells may be analyzed for tumoricidal activity. Briefly, parent antibodies or DVD-Ig are diluted in D-PBS-BSA (Dulbecco's phosphate buffered saline with 0.1% BSA) and added to human tumor cells at final concentrations of 0.01 μg/mL to 100 μg/mL 200 μL. The plates are incubated at 37° C. in a humidified, 5% CO₂ atmosphere for 3 days. The number of live cells in each well is quantified using MTS reagents according to the manufacturer's instructions (Promega, Madison, Wis.) to determine the percent of tumor growth inhibition. Wells without antibody treatment are used as controls of 0% inhibition whereas wells without cells were considered to show 100% inhibition.

[0430] For assessment of apoptosis, caspase-3 activation is determined by the following protocol: antibody-treated cells in 96 well plates are lysed in 120 μl of 1× lysis buffer (1.67 mM Hepes, pH 7.4, 7 mM KCl, 0.83 mM MgCl₂, 0.11 mM EDTA, 0.11 mM EGTA, 0.57% CHAPS, 1 mM DTT, 1× protease inhibitor cocktail tablet; EDTA-free; Roche Pharmaceuticals, Nutley, N.J.) at room temperature with shaking for 20 minutes. After cell lysis, 80 μl of a caspase-3 reaction buffer (48 mM Hepes, pH 7.5, 252 mM sucrose, 0.1% CHAPS, 4 mM DTT, and 2011M Ac-DEVD-AMC substrate; Biomol Research Labs, Inc., Plymouth Meeting, Pa.) is added and the plates are incubated for 2 hours at 37° C. The plates are read on a 1420 VICTOR Multilabel Counter (Perkin Elmer Life Sciences, Downers Grove, Ill.) using the following settings: excitation=360/40, emission=460/40. An increase of fluorescence units from antibody-treated cells relative to the isotype antibody control-treated cells is indicative of apoptosis.

### Example 1.1.2.K

### Inhibition of Cell Proliferation by Parent Antibody and DVD-Ig Constructs

[0431] U87-MG human glioma tumor cells are plated at 2,000 cells/well in 100 μl in 96-well dishes in RPMI medium supplemented with 5% fetal bovine serum, and incubated at 37° C., 5% CO₂ overnight. The following day the cells are treated with serial dilutions of antibody or DVD-Igs (0.013 nM to 133 nM dose range), and incubated at 37° C. in a humidified, 5% CO₂ atmosphere for 5 days. Cell survival/proliferation is measured indirectly by assessing ATP levels using an ATPlite kit (Perkin Elmer, Waltham, Mass.) according to the manufacturer's instructions.

### Example 1.1.2.L

### Inhibition of Receptor Phosphorylation by Parent Antibodies or DVD-Ig Constructs In Vitro

[0432] Human carcinoma cells are plated in 96-well plates at 40,000 cells/well in 180 μl serum-free medium (DMEM+0.1% BSA), and incubated overnight at 37° C., 5% CO₂. Costar EIA plates (Lowell, Mass.) are coated with 100 μl/well of receptor capture Ab (414/ml final concentration), and incubated overnight at room temperature while shaking. The following day, receptor antibody-coated ELISA plates are washed (three times with PBST=0.05% Tween 20 in PBS, pH 7.2-7.4), and 200111 blocking solution is added (1% BSA, 0.05% NaN₃ in PBS, pH 7.2-7.4.) to block for 2 hours at room temperature on a rocker. Human tumor cells are co-incubated with antibodies or DVD-Igs and ligand. Monoclonal antibodies or DVD-Igs diluted in D-PBS-BSA (Dulbecco's phosphate buffered saline with 0.1% BSA) are added to human carcinoma cells at final concentrations of 0.01 μg/mL-100 pg/mL. Growth factors are simultaneously added to the cells at concentrations of 1-100 ng/mL (200 μL), and cells are incubated at 37° C. in a humidified, 5% CO₂ atmosphere for 1 hour. Cells are lysed in 120 μl/well of cold cell extraction buffer (10 mM Tris, pH 7.4, 100 mM NaCl, 1 mM EDTA, 1 mM EGTA, 1 mM NaF, 1 mM sodium orthovanadate, 1% Triton X-100, 10% Glycerol, 0.1% SDS, and protease inhibitor cocktail), and incubated at 4° C. for 20 minutes with shaking. Cell lysates (100 μl) are added to the ELISA plate, and incubated overnight at 4° C. with gentle shaking. The following day, ELISA plates are washed, and 100 μl/well of pTyr-HRP detection Ab is added (p-IGF1R ELISA kit, R&D System # DYC1770, Minneapolis, Minn.), and plates are incubated for 2 hours at 25° C. in the dark. Plates are developed to determine phosphorylation per the manufacturer's instructions.

### Example 1.1.2.M

### Efficacy of a DVD-Ig on the Growth of Human Carcinoma Subcutaneous Flank Xenografts

[0433] A-431 human epidermoid carcinoma cells are grown in vitro to 99% viability, 85% confluence in tissue culture flasks. SCID female mice (Charles Rivers Labs, Wilmington, Mass.) at 19-25 grams are injected subcutaneously into the right flank with 1×10⁶ human tumor cells (1:1 matrigel) on study day 0. Administration (IP, QD, 3×/week) of human IgG control or DVD-Ig was-initiated after mice are size matched into groups of mice with mean tumor volumes of approximately 200 to 320 mm³. The tumors are measured twice a week starting on approximately day 10 post tumor cell injection.

### Example 1.1.2.N

### Binding of Monoclonal Antibodies to the Surface of Human Tumor Cell Lines as Assessed by Flow Cytometry

[0434] Stable cell lines overexpressing a cell-surface antigen of interest or human tumor cell lines were harvested from tissue culture flasks and resuspended in phosphate buffered saline (PBS) containing 5% fetal bovine serum (PBS/FBS). Prior to staining, human tumor cells were incubated on ice with (100 μl) human IgG at 5 μg/ml in PBS/FCS. 1−5×10⁵ cells were incubated with antibody or DVD-Ig (2 μg/mL) in PBS/FBS for 30-60 minutes on ice. Cells were washed twice and 100 μl of F(ab′)2 goat anti human IgG, Fcγ-phycoerythrin (1:200 dilution in PBS) (Jackson ImmunoResearch, West Grove, Pa., Cat. #109-116-170) was added. After a 30 minute incubation on ice, cells were washed twice and resuspended in PBS/FBS. Fluorescence was measured using a Becton Dickinson FACSCalibur (Becton Dickinson, San Jose, Calif.).

[0435] Table 6 shows the FACS data for the DVD-Ig constructs. The geometric mean is the n root of the multiplication product of n fluorescent signals (a1×a2×a3 . . . an). With log-transformed data the geometric mean is used to normalize the weighting of the data distribution. The following table contains the FACS geometric mean of parent antibodies and DVD-Ig constructs.

TABLE 6
Fluorescent Activated Cell Sorting of DVD-Ig Constructs

| Parent | N-terminal | C-terminal | FACS | FACS |
|---|---|---|---|---|
| Antibody | Variable | Variable | Geometric | Geometric |
| or DVD-Ig | Domain | Domain | Mean N- | Mean C- |
| ID | (VD) | (VD) | terminal | terminal |
| AB011 | IGFR | | 535 | |
| DVD1323 | NGF (seq. 2) | IGFR | | 244 |
| DVD1324 | IGFR | NGF (seq. 2) | 825 | |
| AB015 | DLL4 | | 308 | |
| DVD1330 | DLL4 | NGF (seq. 2) | | |
| AB001 | CD-20 | | 1405 | |
| DVD1336 | CD-20 | NGF (seq. 2) | 754 | |
| AB016 | NRP1 | | 338 | |
| DVD1351 | NGF (seq. 2) | NRP1 | | 26 |
| DVD1352 | NRP1 | NGF (seq. 2) | 42 | |

All DVD-Igs showed binding to their cell surface targets. The N-terminal domains of DVD-Igs bound their targets on the cell surface as well as or better than the parent antibody. Binding can be restored or improved by adjusting linker length.

### Example 1.1.2.0

### Binding of Parent Receptor Antibody and DVD-Ig Constructs to the Surface of Human Tumor Cell Lines as Assessed by Flow Cytometry

[0436] Stable cell lines overexpressing cell-surface receptors or human tumor cell lines are harvested from tissue culture flasks and resuspended in Dulbecco's phosphate buffered saline (DPBS) containing 1% fetal calf serum (DPBS/FCS). 1−5×10⁵ cells are incubated with 100 μL antibodies or DVD-Igs (10 ug/mL) in DPBS/FCS for 30-60 minutes on ice. Cells are washed twice and 50 μl of goat anti-human IgG-phycoerythrin (1:50 dilution in DPBS/BSA) (Southern Biotech Associates, Birmingham, Ala. cat#2040-09) is added. After 30-45 minutes incubation on ice, cells are washed twice and resuspended in 125 uL/well 1% formaldehyde in DPBS/FCS. Fluorescence was measured using a Becton Dickinson LSRII (Becton Dickinson, San Jose, Calif.).

### Example 1.2

### Generation Of Parent Monoclonal Antibodies to a Human Antigen of Interest

[0437] Parent mouse mAbs able to bind to and neutralize a human antigen of interest and a variant thereof are obtained as follows:

### Example 1.2.A

### Immunization of Mice with a Human Antigen of Interest

[0438] Twenty micrograms of recombinant purified human antigen (e.g., IGF1,2) mixed with complete Freund's adjuvant or Immunoeasy adjuvant (Qiagen, Valencia, Calif.) is injected subcutaneously into five 6-8 week-old Balb/C, five C57B/6 mice, and five AJ mice on Day 1. On days 24, 38, and 49, twenty micrograms of recombinant purified human antigen variant mixed with incomplete Freund's adjuvant or Immunoeasy adjuvant is injected subcutaneously into the same mice. On day 84 or day 112 or day 144, mice are injected intravenously with 1 μg recombinant purified human antigen of interest.

### Example 1.2.B

### Generation of a Hybridoma

[0439] Splenocytes obtained from the immunized mice described in Example 1.2.A are fused with SP2/O-Ag-14 cells at a ratio of 5:1 according to the established method described in Kohler, G. and Milstein (1975) Nature, 256:495 to generate hybridomas. Fusion products are plated in selection media containing azaserine and hypoxanthine in 96-well plates at a density of 2.5×10⁶ spleen cells per well. Seven to ten days post fusion, macroscopic hybridoma colonies are observed. Supernatant from each well containing hybridoma colonies is tested by ELISA for the presence of antibody to the antigen of interest (as described in Example 1.1.1.A). Supernatants displaying antigen-specific activity are then tested for activity (as described in the assays of Example 1.1.2), for example, the ability to neutralize the antigen of interest in a bioassay such as that described in Example 1.1.2.1).

### Example 1.2.C

### Identification and Characterization of Parent Monoclonal Antibodies to a Human Target Antigen of Interest

### Example 1.2.C.1

### Analyzing Parent Monoclonal Antibody Neutralizing Activity

[0440] Hybridoma supernatants are assayed for the presence of parent antibodies that bind an antigen of interest, generated according to Examples 1.2.A and 1.2.B, and are also capable of binding a variant of the antigen of interest (“antigen variant”). Supernatants with antibodies positive in both assays are then tested for their antigen neutralization potency, for example, in the cytokine bioassay of Example 1.1.2.1. The hybridomas producing antibodies with IC₅₀ values in the bioassay less than 1000 μM, in an embodiment, less than 100 μM are scaled up and cloned by limiting dilution. Hybridoma cells are expanded into media containing 10% low IgG fetal bovine serum (Hyclone #SH30151, Logan, Utah). On average, 250 mL of each hybridoma supernatant (derived from a clonal population) is harvested, concentrated and purified by protein A affinity chromatography, as described in Harlow, E. and Lane, D. 1988 “Antibodies: A Laboratory Manual”. The ability of purified mAbs to inhibit the activity of its target antigen is determined, for example, using the cytokine bioassay as described in Example 1.1.2.1.

### Example 1.2.C.2

### Analyzing Parent Monoclonal Antibody Cross-Reactivity to Cynomolgus Target Antigen of Interest

[0441] To determine whether the selected mAbs described herein recognize cynomolgus antigen of interest, BIACORE analysis is conducted as described herein (Example 1.1.1.G) using recombinant cynomolgus target antigen. In addition, neutralization potencies of mAbs against recombinant cynomolgus antigen of interest may also be measured in the cytokine bioassay (Example 1.1.2.1). MAbs with good cyno cross-reactivity (in an embodiment, within 5-fold of reactivity for human antigen) are selected for future characterization.

### Example 1.2.D

### Determination of the Amino Acid Sequence of the Variable Region for Each Murine Anti-Human Monoclonal Antibody

[0442] Isolation of the cDNAs, expression and characterization of the recombinant anti-human mouse mAbs is conducted as follows. For each amino acid sequence determination, approximately 1×10⁶ hybridoma cells are isolated by centrifugation and processed to isolate total RNA with Trizol (Gibco BRL/Invitrogen, Carlsbad, Calif.) following manufacturer's instructions. Total RNA is subjected to first strand DNA synthesis using the SuperScript First-Strand Synthesis System (Invitrogen, Carlsbad, Calif.) per the manufacturer's instructions. Oligo(dT) is used to prime first-strand synthesis to select for poly(A)+ RNA. The first-strand cDNA product is then amplified by PCR with primers designed for amplification of murine immunoglobulin variable regions (Ig-Primer Sets, Novagen, Madison, Wis.). PCR products are resolved on an agarose gel, excised, purified, and then subcloned with the TOPO Cloning kit into pCR2.1—TOPO vector (Invitrogen, Carlsbad, Calif.) and transformed into TOP10 chemically competent E. coli (Invitrogen, Carlsbad, Calif.). Colony PCR is performed on the transformants to identify clones containing insert. Plasmid DNA is isolated from clones containing insert using a QIAprep Miniprep kit (Qiagen, Valencia, Calif.). Inserts in the plasmids are sequenced on both strands to determine the variable heavy or variable light chain DNA sequences using M13 forward and M13 reverse primers (Fermentas Life Sciences, Hanover Md.). Variable heavy and variable light chain sequences of the mAbs are identified. In an embodiment, the selection criteria for a panel of lead mAbs for next step development (humanization) includes the following:
[0443] The antibody does not contain any N-linked glycosylation sites (NXS), except from the standard one in CH2
[0444] The antibody does not contain any extra cysteines in addition to the normal cysteines in every antibody
[0445] The antibody sequence is aligned with the closest human germline sequences for VH and VL and any unusual amino acids should be checked for occurrence in other natural human antibodies
[0446] N-terminal Glutamine (Q) is changed to Glutamic acid (E) if it does not affect the activity of the antibody. This will reduce heterogeneity due to cyclization of Q
[0447] Efficient signal sequence cleavage is confirmed by Mass Spectrophotometry. This can be done with COS cell or 293 cell material
[0448] The protein sequence is checked for the risk of deamidation of Asn that could result in loss of activity
[0449] The antibody has a low level of aggregation
[0450] The antibody has solubility >5-10 mg/ml (in research phase); >25 mg/ml
[0451] The antibody has a normal size (5-6 nm) by Dynamic Light Scattering (DLS)
[0452] The antibody has a low charge heterogeneity
[0453] The antibody lacks cytokine release (see Example 1.1.2.B)
[0454] The antibody has specificity for the intended cytokine (see Example 1.1.2.C)
[0455] The antibody lacks unexpected tissue cross reactivity (see Example 1.1.2.D)
[0456] The antibody has similarity between human and cynomolgus tissue cross reactivity (see Example 1.1.2.D)

### Example 1.2.2

### Recombinant Humanized Parent Antibodies

### Example 1.2.2.1

### Construction and Expression of Recombinant Chimeric Anti Human Parent Antibodies

[0457] The DNA encoding the heavy chain constant region of murine anti-human parent mAbs is replaced by a cDNA fragment encoding the human IgG1 constant region containing 2 hinge-region amino acid mutations by homologous recombination in bacteria. These mutations are a leucine to alanine change at position 234 (EU numbering) and a leucine to alanine change at position 235 (Lund et al., 1991, J. Immunol., 147:2657). The light chain constant region of each of these antibodies is replaced by a human kappa constant region. Full-length chimeric antibodies are transiently expressed in COS cells by co-transfection of chimeric heavy and light chain cDNAs ligated into the pBOS expression plasmid (Mizushima and Nagata, Nucleic Acids Research 1990, Vol 18, pg 5322). Cell supernatants containing recombinant chimeric antibody are purified by Protein A Sepharose chromatography and bound antibody is eluted by addition of acid buffer. Antibodies are neutralized and dialyzed into PBS.

[0458] The heavy chain cDNA encoding a chimeric mAb is co-transfected with its chimeric light chain cDNA (both ligated in the pBOS vector) into COS cells. Cell supernatant containing recombinant chimeric antibody is purified by Protein A Sepharose chromatography and bound antibody is eluted by addition of acid buffer. Antibodies are neutralized and dialyzed into PBS.

[0459] The purified chimeric anti-human parent mAbs are then tested for their ability to bind (by Biacore) and for functional activity, e.g., to inhibit the cytokine induced production of IgE as described in Examples 1.1.1.G and 1.1.2.B. Chimeric mAbs that maintain the activity of the parent hybridoma mAbs are selected for future development.

### Example 1.2.2.2

### Construction and Expression of Humanized Anti Human Parent Antibodies

### Example 1.2.2.2.A

### Selection of Human Antibody Frameworks

[0460] Each murine variable heavy and variable light chain gene sequence is separately aligned against 44 human immunoglobulin germline variable heavy chain or 46 germline variable light chain sequences (derived from NCBI Ig Blast website at http://www.ncbi.nlm.nih.gov/igblast/retrieveig.html.) using Vector NTI software.

[0461] Humanization is based on amino acid sequence homology, CDR cluster analysis, frequency of use among expressed human antibodies, and available information on the crystal structures of human antibodies. Taking into account possible effects on antibody binding, VH-VL pairing, and other factors, murine residues are mutated to human residues where murine and human framework residues are different, with a few exceptions. Additional humanization strategies are designed based on an analysis of human germline antibody sequences, or a subgroup thereof, that possessed a high degree of homology, i.e., sequence similarity, to the actual amino acid sequence of the murine antibody variable regions.

[0462] Homology modeling is used to identify residues unique to the murine antibody sequences that are predicted to be critical to the structure of the antibody combining site, the CDRs. Homology modeling is a computational method whereby approximate three dimensional coordinates are generated for a protein. The source of initial coordinates and guidance for their further refinement is a second protein, the reference protein, for which the three dimensional coordinates are known and the sequence of which is related to the sequence of the first protein. The relationship among the sequences of the two proteins is used to generate a correspondence between the reference protein and the protein for which coordinates are desired, the target protein. The primary sequences of the reference and target proteins are aligned with coordinates of identical portions of the two proteins transferred directly from the reference protein to the target protein. Coordinates for mismatched portions of the two proteins, e.g., from residue mutations, insertions, or deletions, are constructed from generic structural templates and energy refined to insure consistency with the already transferred model coordinates. This computational protein structure may be further refined or employed directly in modeling studies. The quality of the model structure is determined by the accuracy of the contention that the reference and target proteins are related and the precision with which the sequence alignment is constructed.

[0463] For the murine mAbs, a combination of BLAST searching and visual inspection is used to identify suitable reference structures. Sequence identity of 25% between the reference and target amino acid sequences is considered the minimum necessary to attempt a homology modeling exercise. Sequence alignments are constructed manually and model coordinates are generated with the program Jackal (see Petrey, D. et al. (2003) Proteins 53 (Suppl. 6): 430-435).

[0464] The primary sequences of the murine and human framework regions of the selected antibodies share significant identity. Residue positions that differ are candidates for inclusion of the murine residue in the humanized sequence in order to retain the observed binding potency of the murine antibody. A list of framework residues that differ between the human and murine sequences is constructed manually. Table 7 shows the framework sequences chosen for this study.

TABLE 7
Sequence Of Human IgG Heavy Chain Constant Domain And Light Chain
Constant Domain

| | SEQ | |
|---|---|---|
| Protein | ID NO | Sequence |
| | | 12345678901234567890123456789012345678901 |
| Wild type hIgG1 | 92 | ASTKGPSVFPLAPSSKSTSGGTAALGCLVKDYFPEPVTVSW |
| constant region | | NSGALTSGVHTFPAVLQSSGLYSLSSVVTVPSSSLGTQTYI |
| | | [chemical structure] |
| | | FLFPPKPKDTLMISRTPEVTCVVVDVSHEDPEVKFNWYVDG |
| | | VEVHNAKTKPREEQYNSTYRVVSVLTVLHQDWLNGKEYKCK |
| | | VSNKALPAPIEKTISKAKGQPREPQVYTLPPSREEMTKNQV |
| | | SLTCLVKGFYPSDIAVEWESNGQPENNYKTTPPVLDSDGSF |
| | | FLYSKLTVDKSRWQQGNVFSCSVMHEALHNHYTQKSLSLSP |
| | | GK |
| Mutant hIgG1 | 93 | ASTKGPSVFPLAPSSKSTSGGTAALGCLVKDYFPEPVTVSW |
| constant region | | NSGALTSGVHTFPAVLQSSGLYSLSSVVTVPSSSLGTQTYI |
| | | [chemical structure] |
| | | FLFPPKPKDTLMISRTPEVTCVVVDVSHEDPEVKFNWYVDG |
| | | VEVHNAKTKPREEQYNSTYRVVSVLTVLHQDWLNGKEYKCK |
| | | VSNKALPAPIEKTISKAKGQPREPQVYTLPPSREEMTKNQV |
| | | SLTCLVKGFYPSDIAVEWESNGQPENNYKTTPPVLDSDGSF |
| | | FLYSKLTVDKSRWQQGNVFSCSVMHEALHNHYTQKSLSLSP |
| | | GK |
| Ig kappa constant | 94 | TVAAPSVFIFPPSDEQLKSGTASVVCLLNNFYPREAKVQWK |
| region | | VDNALQSGNSQESVTEQDSKDSTYSLSSTLTLSKADYEKHK |
| | | VYACEVTHQGLSSPVTKSFNRGEC |
| Ig Lambda | 95 | QPKAAPSVTLFPPSSEELQANKATLVCLISDFYPGAVTVAW |
| constant region | | KADSSPVKAGVETTTPSKQSNNKYAASSYLSLTPEQWKSHR |
| | | SYSCQVTHEGSTVEKTVAPTECS |

[0465] The likelihood that a given framework residue would impact the binding properties of the antibody depends on its proximity to the CDR residues. Therefore, using the model structures, the residues that differ between the murine and human sequences are ranked according to their distance from any atom in the CDRs. Those residues that fell within 4.5 Å of any CDR atom are identified as most important and are recommended to be candidates for retention of the murine residue in the humanized antibody (i.e., back mutation).

[0466] In silico constructed humanized antibodies are constructed using oligonucleotides. For each variable region cDNA, 6 oligonucleotides of 60-80 nucleotides each are designed to overlap each other by 20 nucleotides at the 5′ and/or 3′ end of each oligonucleotide. In an annealing reaction, all 6 oligonulceotides are combined, boiled, and annealed in the presence of dNTPs. DNA polymerase I, Large (Klenow) fragment (New England Biolabs #MO210, Beverley, Mass.) is added to fill-in the approximately 40 bp gaps between the overlapping oligonucleotides. PCR is performed to amplify the entire variable region gene using two outermost primers containing overhanging sequences complementary to the multiple cloning site in a modified pBOS vector (Mizushima, S, and Nagata, S. (1990) Nucleic Acids Res. 18: 17). The PCR products derived from each cDNA assembly are separated on an agarose gel and the band corresponding to the predicted variable region cDNA size is excised and purified. The variable heavy region is inserted in-frame onto a cDNA fragment encoding the human IgG1 constant region containing 2 hinge-region amino acid mutations by homologous recombination in bacteria. These mutations are a leucine to alanine change at position 234 (EU numbering) and a leucine to alanine change at position 235 (Lund et al. (1991) J. Immunol. 147:2657). The variable light chain region is inserted in-frame with the human kappa constant region by homologous recombination. Bacterial colonies are isolated and plasmid DNA extracted. cDNA inserts are sequenced in their entirety. Correct humanized heavy and light chains corresponding to each antibody are co-transfected into COS cells to transiently produce full-length humanized anti-human antibodies. Cell supernatants containing recombinant chimeric antibody are purified by Protein A Sepharose chromatography and bound antibody is eluted by addition of acid buffer. Antibodies are neutralized and dialyzed into PBS.

### Example 1.2.2.3

### Characterization of Humanized Antibodies

[0467] The ability of purified humanized antibodies to inhibit a functional activity is determined, e.g., using the cytokine bioassay as described in Examples 1.1.2.A. The binding affinities of the humanized antibodies to recombinant human antigen are determined using surface plasmon resonance (Biacore®) measurement as described in Example 1.1.1.B. The IC₅₀ values from the bioassays and the affinity of the humanized antibodies are ranked. The humanized mAbs that fully maintain the activity of the parent hybridoma mAbs are selected as candidates for future development. The top 2-3 most favorable humanized mAbs are further characterized.

### Example 1.2.2.3.A

### Pharmacokinetic Analysis of Humanized Antibodies

[0468] Pharmacokinetic studies are carried out in Sprague-Dawley rats and cynomolgus monkeys. Male and female rats and cynomolgus monkeys are dosed intravenously or subcutaneously with a single dose of 4 mg/kg mAb and samples are analyzed using antigen capture ELISA, and pharmacokinetic parameters are determined by noncompartmental analysis. Briefly, ELISA plates are coated with goat anti-biotin antibody (5 mg/ml, 4° C., overnight), blocked with Superblock (Pierce), and incubated with biotinylated human antigen at 50 ng/ml in 10% Superblock TTBS at room temperature for 2 hours. Serum samples are serially diluted (0.5% serum, 10% Superblock in TTBS) and incubated on the plate for 30 minutes at room temperature. Detection is carried out with HRP-labeled goat anti human antibody and concentrations are determined with the help of standard curves using the four parameter logistic fit. Values for the pharmacokinetic parameters are determined by non-compartmental model using WinNonlin software (Pharsight Corporation, Mountain View, Calif.). Humanized mAbs with good pharmacokinetics profile (T1/2 is 8-13 days or better, with low clearance and excellent bioavailability 50-100%) are selected.

### Example 1.2.2.3.B

### Physicochemical and In Vitro Stability Analysis of Humanized Monoclonal Antibodies

### Size Exclusion Chromatography

[0469] Antibodies are diluted to 2.5 mg/mL with water and 20 mL is analyzed on a Shimadzu HPLC system using a TSK gel G3000 SWXL column (Tosoh Bioscience, cat# k5539-05k). Samples are eluted from the column with 211 mM sodium sulfate, 92 mM sodium phosphate, pH 7.0, at a flow rate of 0.3 mL/minutes. The HPLC system operating conditions are the following:

[0470] Mobile phase: 211 mM Na₂SO₄, 92 mM Na₂HPO₄.7H₂O, pH 7.0

[0471] Gradient: Isocratic

[0472] Flow rate: 0.3 mL/minute

[0473] Detector wavelength: 280 nm

[0474] Autosampler cooler temp: 4° C.

[0475] Column oven temperature: Ambient

[0476] Run time: 50 minutes

[0477] Table 8 contains purity data of parent antibodies and DVD-Ig constructs expressed as percent monomer (unaggregated protein of the expected molecular weight) as determined by the above protocol.

TABLE 8
Purity of Parent Antibodies and DVD-Ig Constructs
as Determined by Size Exclusion Chromatography

| Parent | N-terminal | C-terminal | |
|---|---|---|---|
| Antibody | Variable | Variable | |
| or DVD-Ig | Domain | Domain | % Monomer |
| ID | (VD) | (VD) | (purity) |
| DVD1311 | NGF (seq. 2) | EGFR (seq 2) | 66.4 |
| DVD1312 | EGFR (seq. 2) | NGF (seq. 2) | 95.3 |
| DVD1313 | NGF (seq. 2) | IGF1, 2 | 75.1 |
| DVD1314 | IGF1, 2 | NGF (seq. 2) | 76.8 |
| DVD1315 | NGF (seq. 2) | RON (seq. 1) | 72.5 |
| DVD1316 | RON (seq. 1) | NGF (seq. 2) | — |
| DVD1317 | NGF (seq. 2) | ErbB3 (seq. 1) | 81.3 |
| DVD1318 | ErbB3 (seq. 1) | NGF (seq. 2) | 73.1 |
| DVD1319 | NGF (seq. 2) | ErbB3 (seq. 2) | 51 |
| DVD1320 | ErbB3 (seq. 2) | NGF (seq. 2) | 86.9 |
| DVD1323 | NGF (seq. 2) | IGF1R | 84.3 |
| DVD1324 | IGF1R | NGF (seq. 2) | 94.4 |
| DVD1325 | NGF (seq. 2) | HGF | 76.9 |
| DVD1326 | HGF | NGF (seq. 2) | 92.3 |
| DVD1327 | NGF (seq. 2) | VEGF (seq. 1) | 87.2 |
| DVD1328 | VEGF (seq. 1) | NGF (seq. 2) | 92.3 |
| DVD1329 | NGF (seq. 2) | DLL4 | 62.6 |
| DVD1330 | DLL4 | NGF (seq. 2) | 80.2 |
| DVD1331 | NGF (seq. 2) | PlGF | 83 |
| DVD1332 | PlGF | NGF (seq. 2) | 95.8 |
| DVD1333 | NGF (seq. 2) | RON (seq. 2) | 61.9 |
| DVD1334 | RON (seq. 2) | NGF (seq. 2) | 100 |
| DVD1335 | NGF (seq. 2) | CD-20 | 70 |
| DVD1336 | CD-20 | NGF (seq. 2) | 81.1 |
| DVD1337 | NGF (seq. 2) | EGFR (seq. 1) | 89.8 |
| DVD1338 | EGFR (seq. 1) | NGF (seq. 2) | 92.5 |
| DVD1339 | NGF (seq. 2) | HER2 | 72.6 |
| DVD1340 | HER2 | NGF (seq. 2) | 66.4 |
| DVD1349 | NGF (seq. 2) | c-MET | — |
| DVD1350 | c-MET | NGF (seq. 2) | — |
| DVD1351 | NGF (seq. 2) | NRP1 (seq 1) | 75.5 |
| DVD1352 | NRP1 (seq 1) | NGF (seq. 2) | 75.3 |
| DVD1361 | NGF (seq. 2) | ErbB3 (seq. 3) | — |
| DVD1362 | ErbB3 (seq. 3) | NGF (seq. 2) | 67 |
| DVD1369 | NGF (seq. 2) | EGFR (seq. 3) | 86.6 |
| DVD1370 | EGFR (seq. 3) | NGF (seq. 2) | 93.5 |

DVD-Igs showed an excellent SEC profile with most DVD-Igs showing >90% monomer. This DVD-ig profile is similar to that observed for parent antibodies.

### SDS-PAGE

[0478] Antibodies are analyzed by sodium dodecyl sulfate-polyacrylamide gel electrophoresis

[0479] (SDS-PAGE) under both reducing and non-reducing conditions. Adalimumab lot AFP04C is used as a control. For reducing conditions, the samples are mixed 1:1 with 2× tris glycine SDS-PAGE sample buffer (Invitrogen, cat# LC2676, lot#1323208) with 100 mM DTT, and heated at 60° C. for 30 minutes. For non-reducing conditions, the samples are mixed 1:1 with sample buffer and heated at 100° C. for 5 minutes. The reduced samples (10 mg per lane) are loaded on a 12% pre-cast tris-glycine gel (Invitrogen, cat# EC6005box, lot#6111021), and the non-reduced samples (10 mg per lane) are loaded on an 8%-16% pre-cast tris-glycine gel (Invitrogen, cat# EC6045box, lot#6111021). SeeBlue Plus 2 (Invitrogen, cat#LC5925, lot#1351542) is used as a molecular weight marker. The gels are run in a XCell SureLock mini cell gel box (Invitrogen, cat# E10001) and the proteins are separated by first applying a voltage of 75 to stack the samples in the gel, followed by a constant voltage of 125 until the dye front reached the bottom of the gel. The running buffer used is 1× tris glycine SDS buffer, prepared from a 10× tris glycine SDS buffer (ABC, MPS-79-080106)). The gels are stained overnight with colloidal blue stain (Invitrogen cat#46-7015, 46-7016) and destained with Milli-Q water until the background is clear. The stained gels are then scanned using an Epson Expression scanner (model 1680, S/N DASX003641).

### Sedimentation Velocity Analysis

[0480] Antibodies are loaded into the sample chamber of each of three standard two-sector carbon epon centerpieces. These centerpieces have a 1.2 cm optical path length and are built with sapphire windows. PBS is used for a reference buffer and each chamber contained 140 μL. All samples are examined simultaneously using a 4-hole (AN-60Ti) rotor in a Beckman ProteomeLab XL-I analytical ultracentrifuge (serial # PL106C01).

[0481] Run conditions are programmed and centrifuge control is performed using ProteomeLab (v5.6). The samples and rotor are allowed to thermally equilibrate for one hour prior to analysis (20.0±0.1° C.). Confirmation of proper cell loading is performed at 3000 rpm and a single scan is recorded for each cell. The sedimentation velocity conditions are the following:

[0482] Sample Cell Volume: 420 mL

[0483] Reference Cell Volume: 420 mL

[0484] Temperature: 20° C.

[0485] Rotor Speed: 35,000 rpm

[0486] Time: 8:00 hours

[0487] UV Wavelength: 280 nm

[0488] Radial Step Size: 0.003 cm

[0489] Data Collection One data point per step without signal averaging.

[0490] Total Number of Scans: 100

### LC-MS Molecular Weight Measurement of Intact Antibodies

[0491] Molecular weight of intact antibodies are analyzed by LC-MS. Each antibody is diluted to approximately 1 mg/mL with water. An 1100 HPLC (Agilent) system with a protein microtrap (Michrom Bioresources, Inc, cat#004/25109/03) is used to desalt and introduce 5 mg of the sample into an API Qstar pulsar i mass spectrometer (Applied Biosystems). A short gradient is used to elute the samples. The gradient is run with mobile phase A (0.08% FA, 0.02% TFA in HPLC water) and mobile phase B (0.08% FA and 0.02% TFA in acetonitrile) at a flow rate of 50 mL/minute. The mass spectrometer is operated at 4.5 kvolts spray voltage with a scan range from 2000 to 3500 mass to charge ratio.

### LC-MS Molecular Weight Measurement of Antibody Light and Heavy Chains

[0492] Molecular weight measurement of antibody light chain (LC), heavy chain (HC) and deglycosylated HC are analyzed by LC-MS. Aantibody is diluted to 1 mg/mL with water and the sample is reduced to LC and HC with a final concentration of 10 mM DTT for 30 minutes at 37° C. To deglycosylate the antibody, 100 mg of the antibody is incubated with 2 mL of PNGase F, 5 mL of 10% N-octylglucoside in a total volume of 100 mL overnight at 37° C. After deglycosylation the sample is reduced with a final concentration of 10 mM DTT for 30 minutes at 37° C. An Agilent 1100 HPLC system with a C4 column (Vydac, cat#214TP5115, S/N 060206537204069) is used to desalt and introduce the sample (5 mg) into an API Qstar pulsar i mass spectrometer (Applied Biosystems). A short gradient is used to elute the sample. The gradient is run with mobile phase A (0.08% FA, 0.02% TFA in HPLC water) and mobile phase B (0.08% FA and 0.02% TFA in acetonitrile) at a flow rate of 50 mL/minute. The mass spectrometer is operated at 4.5 kvolts spray voltage with a scan range from 800 to 3500 mass to charge ratio.

### Peptide Mapping

[0493] Antibody is denatured for 15 minutes at room temperature with a final concentration of 6 M guanidine hydrochloride in 75 mM ammonium bicarbonate. The denatured samples are reduced with a final concentration of 10 mM DTT at 37° C. for 60 minutes, followed by alkylation with 50 mM iodoacetic acid (IAA) in the dark at 37° C. for 30 minutes. Following alkylation, the sample is dialyzed overnight against four liters of 10 mM ammonium bicarbonate at 4° C. The dialyzed sample is diluted to 1 mg/mL with 10 mM ammonium bicarbonate, pH 7.8 and 100 mg of antibody is either digested with trypsin (Promega, cat# V5111) or Lys-C (Roche, cat#11 047 825 001) at a 1:20 (w/w) trypsin/Lys-C: antibody ratio at 37° C. for 4 hrs. Digests are quenched with 1 mL of 1 N HCl. For peptide mapping with mass spectrometer detection, 40 mL of the digests are separated by reverse phase high performance liquid chromatography (RPHPLC) on a C18 column (Vydac, cat#218TP51, S/N NE9606 10.3.5) with an Agilent 1100 HPLC system. The peptide separation is run with a gradient using mobile phase A (0.02% TFA and 0.08% FA in HPLC grade water) and mobile phase B (0.02% TFA and 0.08% FA in acetonitrile) at a flow rate of 50 mL/minutes. The API QSTAR Pulsar i mass spectromer is operated in positive mode at 4.5 kvolts spray voltage and a scan range from 800 to 2500 mass to charge ratio.

### Disulfide Bond Mapping

[0494] To denature the antibody, 100 mL of the antibody is mixed with 300 mL of 8 M guanidine HCl in 100 mM ammonium bicarbonate. The pH is checked to ensure that it is between 7 and 8 and the samples are denatured for 15 minutes at room temperature in a final concentration of 6 M guanidine HCl. A portion of the denatured sample (100 mL) is diluted to 600 mL with Milli-Q water to give a final guanidine-HCl concentration of 1 M. The sample (220 mg) is digested with either trypsin (Promega, cat #V5111, lot#22265901) or Lys-C (Roche, cat#11047825001, lot#12808000) at a 1:50 trypsin or 1:50 Lys-C: antibody (w/w) ratios (4.4 mg enzyme: 220 mg sample) at 37° C. for approximately 16 hours. An additional 5 mg of trypsin or Lys-C is added to the samples and digestion is allowed to proceed for an additional 2 hours at 37° C. Digestions are stopped by adding 1 mL of TFA to each sample. Digested samples are separated by RPHPLC using a C18 column (Vydac, cat#218TP51 S/N NE020630-4-1A) on an Agilent HPLC system. The separation is run with the same gradient used for peptide mapping using mobile phase A (0.02% TFA and 0.08% FA in HPLC grade water) and mobile phase B (0.02% TFA and 0.08% FA in acetonitrile) at a flow rate of 50 mL/minute. The HPLC operating conditions are the same as those used for peptide mapping. The API QSTAR Pulsar i mass spectromer is operated in positive mode at 4.5 kvolts spray voltage and a scan range from 800 to 2500 mass-to-charge ratio. Disulfide bonds are assigned by matching the observed MWs of peptides with the predicted MWs of tryptic or Lys-C peptides linked by disulfide bonds.

### Free Sulfhydryl Determination

[0495] The method used to quantify free cysteines in an antibody is based on the reaction of Ellman's reagent, 5,50-dithio-bis(2-nitrobenzoic acid) (DTNB), with sulfhydryl groups (SH) which gives rise to a characteristic chromophoric product, 5-thio-(2-nitrobenzoic acid) (TNB). The reaction is illustrated in the formula:

DTNB+RSH®RS−TNB+TNB−+H+

[0496] The absorbance of the TNB-is measured at 412 nm using a Cary 50 spectrophotometer. An absorbance curve is plotted using dilutions of 2 mercaptoethanol (b-ME) as the free SH standard and the concentrations of the free sulfhydryl groups in the protein are determined from absorbance at 412 nm of the sample.

[0497] The b-ME standard stock is prepared by a serial dilution of 14.2 M b-ME with HPLC grade water to a final concentration of 0.142 mM. Then standards in triplicate for each concentration are prepared. Antibody is concentrated to 10 mg/mL using an amicon ultra 10,000 MWCO centrifugal filter (Millipore, cat# UFC801096, lot# L31CN5251) and the buffer is changed to the formulation buffer used for adalimumab (5.57 mM sodium phosphate monobasic, 8.69 mM sodium phosphate dibasic, 106.69 mM NaCl, 1.07 mM sodium citrate, 6.45 mM citric acid, 66.68 mM mannitol, pH 5.2, 0.1% (w/v) Tween). The samples are mixed on a shaker at room temperature for 20 minutes. Then 180 mL of 100 mM Tris buffer, pH 8.1 is added to each sample and standard followed by the addition of 300 mL of 2 mM DTNB in 10 mM phosphate buffer, pH 8.1. After thorough mixing, the samples and standards are measured for absorption at 412 nm on a Cary 50 spectrophotometer. The standard curve is obtained by plotting the amount of free SH and OD₄₁₂ nm of the b-ME standards. Free SH content of samples are calculated based on this curve after subtraction of the blank.

### Weak Cation Exchange Chromatography

[0498] Antibody is diluted to 1 mg/mL with 10 mM sodium phosphate, pH 6.0. Charge heterogeneity is analyzed using a Shimadzu HPLC system with a WCX-10 ProPac analytical column (Dionex, cat#054993, S/N 02722). The samples are loaded on the column in 80% mobile phase A (10 mM sodium phosphate, pH 6.0) and 20% mobile phase B (10 mM sodium phosphate, 500 mM NaCl, pH 6.0) and eluted at a flow rate of 1.0 mllminute.

### Oligosaccharide Profiling

[0499] Oligosaccharides released after PNGase F treatment of antibody are derivatized with 2-aminobenzamide (2-AB) labeling reagent. The fluorescent-labeled oligosaccharides are separated by normal phase high performance liquid chromatography (NPHPLC) and the different forms of oligosaccharides are characterized based on retention time comparison with known standards.

[0500] The antibody is first digested with PNGaseF to cleave N-linked oligosaccharides from the Fc portion of the heavy chain. The antibody (200 mg) is placed in a 500 mL Eppendorf tube along with 2 mL PNGase F and 3 mL of 10% N-octylglucoside. Phosphate buffered saline is added to bring the final volume to 60 mL. The sample is incubated overnight at 37° C. in an Eppendorf thermomixer set at 700 RPM. Adalimumab lot AFPO₄C is also digested with PNGase F as a control.

[0501] After PNGase F treatment, the samples are incubated at 95° C. for 5 minutes in an Eppendorf thermomixer set at 750 RPM to precipitate out the proteins, then the samples are placed in an Eppendorf centrifuge for 2 minutes at 10,000 RPM to spin down the precipitated proteins. The supernatent containing the oligosaccharides are transferred to a 500 mL Eppendorf tube and dried in a speed-vac at 65° C.

[0502] The oligosaccharides are labeled with 2AB using a 2AB labeling kit purchased from Prozyme (cat# GKK-404, lot#132026). The labeling reagent is prepared according to the manufacturer's instructions. Acetic acid (150 mL, provided in kit) is added to the DMSO vial (provided in kit) and mixed by pipeting the solution up and down several times. The acetic acid/DMSO mixture (100 mL) is transferred to a vial of 2-AB dye (just prior to use) and mixed until the dye is fully dissolved. The dye solution is then added to a vial of reductant (provided in kit) and mixed well (labeling reagent). The labeling reagent (5 mL) is added to each dried oligosaccharide sample vial, and mixed thoroughly. The reaction vials are placed in an Eppendorf thermomixer set at 65° C. and 700-800 RPM for 2 hours of reaction.

[0503] After the labeling reaction, the excess fluorescent dye is removed using GlycoClean S Cartridges from Prozyme (cat# GKI-4726). Prior to adding the samples, the cartridges are washed with 1 mL of milli-Q water followed with 5 ishes of 1 mL 30% acetic acid solution. Just prior to adding the samples, 1 mL of acetonitrile (Burdick and Jackson, cat# AH015-4) is added to the cartridges.

[0504] After all of the acetonitrile passed through the cartridge, the sample is spotted onto the center of the freshly washed disc and allowed to adsorb onto the disc for 10 minutes. The disc is washed with 1 mL of acetonitrile followed by five washes of 1 mL of 96% acetonitrile. The cartridges are placed over a 1.5 mL Eppendorf tube and the 2-AB labeled oligosaccharides are eluted with 3 ishes (400 mL each ish) of milli Q water.

[0505] The oligosaccharides are separated using a Glycosep N HPLC (cat# GKI-4728) column connected to a Shimadzu HPLC system. The Shimadzu HPLC system consisted of a system controller, degasser, binary pumps, autosampler with a sample cooler, and a fluorescent detector.

### Stability at Elevated Temperatures

[0506] The buffer of antibody is either 5.57 mM sodium phosphate monobasic, 8.69 mM sodium phosphate dibasic, 106.69 mM NaCl, 1.07 mM sodium citrate, 6.45 mM citric acid, 66.68 mM mannitol, 0.1% (w/v) Tween, pH 5.2; or 10 mM histidine, 10 mM methionine, 4% mannitol, pH 5.9 using Amicon ultra centrifugal filters. The final concentration of the antibodies is adjusted to 2 mg/mL with the appropriate buffers. The antibody solutions are then filter sterized and 0.25 mL aliquots are prepared under sterile conditions. The aliquots are left at either −80° C., 5° C., 25° C., or 40° C. for 1, 2 or 3 weeks. At the end of the incubation period, the samples are analyzed by size exclusion chromatography and SDS-PAGE.

[0507] The stability samples are analyzed by SDS-PAGE under both reducing and non-reducing conditions. The procedure used is the same as described herein. The gels are stained overnight with colloidal blue stain (Invitrogen cat#46-7015, 46-7016) and destained with Milli-Q water until the background is clear. The stained gels are then scanned using an Epson Expression scanner (model 1680, S/N DASX003641). To obtain more sensitivity, the same gels are silver stained using silver staining kit (Owl Scientific) and the recommended procedures given by the manufacturer is used.

### Example 1.2.2.3.C

### Efficacy of a Humanized Monoclonal Antibody by Itself or in Combination with Chemotherapy on the Growth of Human Carcinoma Xenografts

[0508] Human cancer cells are grown in vitro to 99% viability, 85% confluence in tissue culture flasks. SCID female or male mice (Charles Rivers Labs) at 19-25 grams, are ear tagged and shaved. Mice are then inoculated subcutaneously into the right flank with 0.2 ml of 2×10⁶ human tumor cells (1:1 matrigel) on study day 0. Administration (IP, Q3D/week) of vehicle (PBS), humanized antibody, and/or chemotherapy is initiated after mice are size matched into separate cages of mice with mean tumor volumes of approximately 150 to 200 mm³. The tumors are measured by a pair of calipers twice a week starting on approximately day 10 post inoculation and the tumor volumes calculated according to the formula V=L×W²/2 (V: volume, mm³; L: length, mm; W: width, m). Reduction in tumor volume is seen in animals treated with mAb alone or in combination with chemotherapy relative to tumors in animals that received only vehicle or an isotype control mAb.

### Example 1.2.23.D

### FACS Based Redirected Cytotoxicity (rCTL) Assay

[0509] Human CD3+T cells were isolated from previously frozen isolated peripheral blood mononuclear cells (PBMC) by a negative selection enrichment column (R&D Systems, Minneapolis, Minn.; Cat.#HTCC-525). T cells were stimulated for 4 days in flasks (vent cap, Corning, Acton, Mass.) coated with 1014/mL anti-CD3 (OKT-3, eBioscience, Inc., San Diego, Calif.) and 2 μg/mL anti-CD28 (CD28.2, eBioscience, Inc., San Diego, Calif.) in D-PBS (Invitrogen, Carlsbad, Calif.) and cultured in 30 U/mL IL-2 (Roche) in complete RPMI 1640 media (Invitrogen, Carlsbad, Calif.) with L-glutamine, 55 mM 13-ME, Pen/Strep, 10% FBS). T cells were then rested overnight in 30 U/mL IL-2 before using in assay. DoHH2 or Raji target cells were labeled with PKH26 (Sigma-Aldrich, St. Louis, Mo.) according to manufacturer's instructions. RPMI 1640 media (no phenol, Invitrogen, Carlsbad, Calif.) containing L-glutamine and 10% FBS (Hyclone, Logan, Utah) was used throughout the rCTL assay. (See Dreier et al. (2002) Int J Cancer 100:690).

[0510] Effector T cells (E) and targets (T) were plated at a final cell concentration of 10⁵ and 10⁴ cells/well in 96-well plates (Costar #3799, Acton, Mass.), respectively to give an E:T ratio of 10:1. DVD-Ig molecules were diluted to obtain concentration-dependent titration curves. After an overnight incubation cells are pelleted and washed with D-PBS once before resuspending in FACS buffer containing 0.1% BSA (Invitrogen, Carlsbad, Calif.), 0.1% sodium azide and 0.5 μg/mL propidium iodide (BD) in D-PBS. FACS data was collected on a FACS Canto II machine (Becton Dickinson, San Jose, Calif.) and analyzed in Flowjo (Treestar). The percent live targets in the DVD-Ig treated samples divided by the percent total targets (control, no treatment) was calculated to determine percent specific lysis. IC₅₀s were calculated in Prism (Graphpad).

### Example 1.4

### Generation of a DVD-Ig

[0511] DVD-Ig molecules capable of binding two antigens are constructed using two parent monoclonal antibodies, one against human antigen A, and the other against human antigen B, selected as described herein.

### Example 1.4.1

### Generation of a DVD-Ig Having Two Linker Lengths

[0512] A constant region containing μl Fc with mutations at 234, and 235 to eliminate ADCC/CDC effector functions is used. Four different anti-A/B DVD-Ig constructs are generated: 2 with short linker and 2 with long linker, each in two different domain orientations: V_{A}-V_{B}-C and V_{B}-V_{A}-C (see Table 9). The linker sequences, derived from the N-terminal sequence of human Cl/Ck or CH1 domain, are as follows:

[0513] For DVDAB constructs:

[0514] light chain (if anti-A has)):Short linker: QPKAAP (SEQ ID NO: 15); Long linker:

| | |
|---|---|
| QPKAAPSVTLFPP | (SEQ ID NO: 16) |

[0515] light chain (if anti-A has K):Short linker: TVAAP (SEQ ID NO: 13); Long linker:

| | |
|---|---|
| TVAAPSVFIFPP | (SEQ ID NO: 14) |

[0516] heavy chain (γ1): Short linker: ASTKGP (SEQ ID NO: 21); Long linker:

| | |
|---|---|
| ASTKGPSVFPLAP | (SEQ ID NO: 22) |

[0517] For DVDBA constructs:

[0518] light chain (if anti-B has λ):Short linker: QPKAAP (SEQ ID NO: 15); Long linker:

| | |
|---|---|
| QPKAAPSVTLFPP | (SEQ ID NO: 16) |

[0519] light chain (if anti-B has k):Short linker: TVAAP (SEQ ID NO: 13); Long linker:

| | |
|---|---|
| TVAAPSVFIFPP | (SEQ ID NO: 14) |

[0520] heavy chain (γ1): Short linker: ASTKGP (SEQ ID NO: 21); Long linker:

| | |
|---|---|
| ASTKGPSVFPLAP | (SEQ ID NO: 22) |

[0521] Heavy and light chain constructs are subcloned into the pBOS expression vector, and expressed in COS cells, followed by purification by Protein A chromatography. The purified materials are subjected to SDS-PAGE and SEC analysis.

[0522] Table 9 describes the heavy chain and light chain constructs used to express each anti-A/B DVD-Ig protein.

TABLE 9
Anti-A/B DVD-Ig Constructs

| DVD-Ig protein | Heavy chain construct | Light chain construct |
|---|---|---|
| DVDABSL | DVDABHC-SL | DVDABLC-SL |
| DVDABLL | DVDABHC-LL | DVDABLC-LL |
| DVDBASL | DVDBAHC-SL | DVDBALC-SL |
| DVDBALL | DVDBAHC-LL | DVDBALC-LL |

### Example 1.4.2

### Molecular Cloning of DNA Constructs for DVDABSL and DVDABLL

[0523] To generate heavy chain constructs DVDABHC-LL and DVDABHC-SL, VH domain of A antibody is PCR amplified using specific primers (3′ primers contain short/long liner sequence for SL/LL constructs, respectively); meanwhile VH domain of B antibody is amplified using specific primers (5′ primers contains short/long liner sequence for SL/LL constructs, respectively). Both PCR reactions are performed according to standard PCR techniques and procedures. The two PCR products are gel-purified, and used together as overlapping template for the subsequent overlapping PCR reaction. The overlapping PCR products are subcloned into Srf I and Sal I double digested pBOS-hCγ1,z non-a mammalian expression vector (Abbott) by using standard homologous recombination approach.

[0524] To generate light chain constructs DVDABLC-LL and DVDABLC-SL, VL domain of A antibody is PCR amplified using specific primers (3′ primers contain short/long liner sequence for SL/LL constructs, respectively); meanwhile VL domain of B antibody is amplified using specific primers (5′ primers contains short/long liner sequence for SL/LL constructs, respectively). Both PCR reactions are performed according to standard PCR techniques and procedures. The two PCR products are gel-purified, and used together as overlapping template for the subsequent overlapping PCR reaction using standard PCR conditions. The overlapping PCR products are subcloned into Srf I and Not I double digested pBOS-hCk mammalian expression vector (Abbott) by using standard homologous recombination approach. Similar approach has been used to generate DVDBASL and DVDBALL as described below:

### Example 1.4.3

### Molecular Cloning of DNA Constructs for DVDBASL and DVDBALL

[0525] To generate heavy chain constructs DVDBAHC-LL and DVDBAHC-SL, VH domain of antibody B is PCR amplified using specific primers (3′ primers contain short/long liner sequence for SL/LL constructs, respectively); meanwhile VH domain of antibody A is amplified using specific primers (5′ primers contains short/long liner sequence for SL/LL constructs, respectively). Both PCR reactions are performed according to standard PCR techniques and procedures. The two PCR products are gel-purified, and used together as overlapping template for the subsequent overlapping PCR reaction using standard PCR conditions. The overlapping PCR products are subcloned into Srf I and Sal I double digested pBOS-hCγ1,z non-a mammalian expression vector (Abbott) by using standard homologous recombination approach.

[0526] To generate light chain constructs DVDBALC-LL and DVDBALC-SL, VL domain of antibody B is PCR amplified using specific primers (3′ primers contain short/long liner sequence for SL/LL constructs, respectively); meanwhile VL domain of antibody A is amplified using specific primers (5′ primers contains short/long liner sequence for SL/LL constructs, respectively). Both PCR reactions are performed according to standard PCR techniques and procedures. The two PCR products are gel-purified, and used together as overlapping template for the subsequent overlapping PCR reaction using standard PCR conditions. The overlapping PCR products are subcloned into Srf I and Not I double digested pBOS-hCk mammalian expression vector (Abbott) by using standard homologous recombination approach.

### Example 1.4.4

### Construction and Expression of Additional DVD-Ig

### Example 1.4.4.1

### Preparation of DVD-Ig Vector Constructs

[0527] Parent antibody amino acid sequences for specific antibodies, which recognize specific antigens or epitopes thereof, for incorporation into a DVD-Ig can be obtained by preparation of hybridomas as described above or can be obtained by sequencing known antibody proteins or nucleic acids. In addition, known sequences can be obtained from the literature. The sequences can be used to synthesize nucleic acids using standard DNA synthesis or amplification technologies and assembling the desired antibody fragments into expression vectors, using standard recombinant DNA technology, for expression in cells.

[0528] For example, nucleic acid codons were determined from amino acids sequences and oligonucleotide DNA was synthesized by Blue Heron Biotechnology, Inc. (www.blueheronbio.com) Bothell, Wash. USA. The oligonucleotides were assembled into 300-2,000 base pair double-stranded DNA fragments, cloned into a plasmid vector and sequence-verified. Cloned fragments were assembled using an enzymatic process to yield the complete gene and subcloned into an expression vector. (See U.S. Pat. Nos. 7,306,914; 7,297,541; 7,279,159; 7,150,969; 20080115243; 20080102475; 20080081379; 20080075690; 20080063780; 20080050506; 20080038777; 20080022422; 20070289033; 20070287170; 20070254338; 20070243194; 20070225227; 20070207171; 20070150976; 20070135620; 20070128190; 20070104722; 20070092484; 20070037196; 20070028321; 20060172404; 20060162026; 20060153791; 20030215458; 20030157643).

[0529] A group of pHybE vectors (U.S. Patent Application Ser. No. 61/021,282) were used for parental antibody and DVD-Ig cloning. V1, derived from pJP183; pHybE-hCgl,z, non-a V2, was used for cloning of antibody and DVD heavy chains with a wildtype constant region. V2, derived from pJP191; pHybE-hCk V2, was used for cloning of antibody and DVD light chains with a kappa constant region. V3, derived from pJP192; pHybE-hCl V2, was used for cloning of antibody and DVDs light chains with a lambda constant region. V4, built with a lambda signal peptide and a kappa constant region, was used for cloning of DVD light chains with a lambda-kappa hybrid V domain. V5, built with a kappa signal peptide and a lambda constant region, was used for cloning of DVD light chains with a kappa-lambda hybrid V domain. V7, derived from pJP183; pHybE-hCgl,z,non-a V2, was used for cloning of antibody and DVD heavy chains with a (234,235 AA) mutant constant region.

[0530] Referring to Table 10, a number of vectors were used in the cloning of the parent antibodies and DVD-Ig VH and VL chains.

TABLE 10
Vectors Used to Clone Parent Antibodies and DVD-Igs

| ID | Heavy chain vector | Light chain vector |
|---|---|---|
| DVD1307 | V1 | V2 |
| DVD1308 | V1 | V2 |
| DVD1309 | V1 | V5 |
| DVD1310 | V1 | V4 |
| DVD1311 | V1 | V2 |
| DVD1312 | V1 | V2 |
| DVD1313 | V1 | V5 |
| DVD1314 | V1 | V4 |
| DVD1315 | V1 | V2 |
| DVD1316 | V1 | V2 |
| DVD1317 | V1 | V2 |
| DVD1318 | V1 | V2 |
| DVD1319 | V1 | V2 |
| DVD1320 | V1 | V2 |
| DVD1321 | V1 | V2 |
| DVD1322 | V1 | V2 |
| DVD1323 | V1 | V2 |
| DVD1324 | V1 | V2 |
| DVD1325 | V1 | V2 |
| DVD1326 | V1 | V2 |
| DVD1327 | V1 | V2 |
| DVD1328 | V1 | V2 |
| DVD1329 | V1 | V2 |
| DVD1330 | V1 | V2 |
| DVD1331 | V1 | V2 |
| DVD1332 | V1 | V2 |
| DVD1333 | V1 | V2 |
| DVD1334 | V1 | V2 |
| DVD1335 | V1 | V2 |
| DVD1336 | V1 | V2 |
| DVD1337 | V1 | V2 |
| DVD1338 | V1 | V2 |
| DVD1339 | V1 | V2 |
| DVD1340 | V1 | V2 |
| DVD1341 | V1 | V2 |
| DVD1342 | V1 | V2 |
| DVD1343 | V1 | V5 |
| DVD1344 | V1 | V4 |
| DVD1345 | V1 | V2 |
| DVD1346 | V1 | V2 |
| DVD1347 | V1 | V2 |
| DVD1348 | V1 | V2 |
| DVD1349 | V1 | V2 |
| DVD1350 | V1 | V2 |
| DVD1351 | V1 | V2 |
| DVD1352 | V1 | V2 |
| DVD1353 | V1 | V2 |
| DVD1354 | V1 | V2 |
| DVD1357 | V1 | V2 |
| DVD1358 | V1 | V2 |
| DVD1361 | V1 | V5 |
| DVD1362 | V1 | V4 |
| DVD1363 | V1 | V2 |
| DVD1364 | V1 | V2 |
| DVD1365 | V1 | V2 |
| DVD1366 | V1 | V2 |
| DVD1367 | V1 | V2 |
| DVD1368 | V1 | V2 |
| DVD1369 | V1 | V2 |
| DVD1370 | V1 | V2 |

### Example 1.4.4.2

### Transfection And Expression In 293 Cells

[0531] The DVD-Ig vector constructs are tranfected into 293 cells for production of DVD-Ig protein. The 293 transient transfection procedure used is a modification of the methods published in Durocher et al. (2002) Nucleic Acids Res. 30(2):E9 and Pham et al. (2005) Biotech. Bioengineering 90(3):332-44. Reagents that were used in the transfection included:
[0532] HEK 293-6E cells (human embryonic kidney cell line stably expressing EBNA1; obtained from National Research Council Canada) cultured in disposable Erlenmeyer flasks in a humidified incubator set at 130 rpm, 37° C. and 5% CO₂.
[0533] Culture medium: FreeStyle 293 Expression Medium (Invitrogen 12338-018) plus 25 μg/mL Geneticin (G418) (Invitrogen 10131-027) and 0.1% Pluronic F-68 (Invitrogen 24040-032).
[0534] Transfection medium: FreeStyle 293 Expression Medium plus 10 mM HEPES (Invitrogen 15630-080).
[0535] Polyethylenimine (PEI) stock: 1 mg/mL sterile stock solution, pH 7.0, prepared with linear 25 kDa PEI (Polysciences) and stored at less than −15° C.
[0536] Tryptone Feed Medium: 5% w/v sterile stock of Tryptone N1 (Organotechnie, 19554) in FreeStyle 293 Expression Medium.
   Cell preparation for transfection: Approximately 2-4 hours prior to transfection, HEK 293-6E cells are harvested by centrifugation and resuspended in culture medium at a cell density of approximately 1 million viable cells per mL. For each transfection, 40 mL of the cell suspension is transferred into a disposable 250-mL Erlenmeyer flask and incubated for 2-4 hours.
   Transfection: The transfection medium and PEI stock are prewarmed to room temperature (RT). For each transfection, 25 μg of plasmid DNA and 50 ng of polyethylenimine (PEI) are combined in 5 mL of transfection medium and incubated for 15-20 minutes at RT to allow the DNA:PEI complexes to form. For the BR3—Ig transfections, 25 ng of BR3—Ig plasmid is used per transfection. Each 5-mL DNA:PEI complex mixture is added to a 40-mL culture prepared previously and returned to the humidified incubator set at 130 rpm, 37° C. and 5% CO₂. After 20-28 hours, 5 mL of Tryptone Feed Medium is added to each transfection and the cultures are continued for six days.

[0537] Table 11 contains the yield data for parent antibodies or DVD-Ig constructs expressed as milligrams per liter in 293 cells.

TABLE 11
Transient Expression in Yields of Parent Antibodies
and DVD-Ig Constructs in 293 Cells

| | N-terminal | C-terminal | |
|---|---|---|---|
| | Variable | Variable | Expression |
| Parent Antibody | Domain | Domain | Yield |
| or DVD-Ig ID | (VD) | (VD) | (mg/L) |
| DVD1311 | NGF (seq. 2) | EGFR (seq 2) | 58.8 |
| DVD1312 | EGFR (seq. 2) | NGF (seq. 2) | 17 |
| DVD1313 | NGF (seq. 2) | IGF1, 2 | 74.6 |
| DVD1314 | IGF1, 2 | NGF (seq. 2) | 22.2 |
| DVD1315 | NGF (seq. 2) | RON (seq. 1) | 92.6 |
| DVD1316 | RON (seq. 1) | NGF (seq. 2) | 60.4 |
| DVD1317 | NGF (seq. 2) | ErbB3 (seq. 1) | 4 |
| DVD1318 | ErbB3 (seq. 1) | NGF (seq. 2) | 10.4 |
| DVD1319 | NGF (seq. 2) | ErbB3 (seq. 2) | 0.38 |
| DVD1320 | ErbB3 (seq. 2) | NGF (seq. 2) | 39.2 |
| DVD1323 | NGF (seq. 2) | IGF1R | 18.8 |
| DVD1324 | IGF1R | NGF (seq. 2) | 12.8 |
| DVD1325 | NGF (seq. 2) | HGF | 42.2 |
| DVD1326 | HGF | NGF (seq. 2) | 32.4 |
| DVD1327 | NGF (seq. 2) | VEGF (seq. 1) | 26 |
| DVD1328 | VEGF (seq. 1) | NGF (seq. 2) | 5.8 |
| DVD1329 | NGF (seq. 2) | DLL4 | 87.8 |
| DVD1330 | DLL4 | NGF (seq. 2) | 110.8 |
| DVD1331 | NGF (seq. 2) | PlGF | 100.4 |
| DVD1332 | PlGF | NGF (seq. 2) | 19.2 |
| DVD1333 | NGF (seq. 2) | RON (seq. 2) | 34.6 |
| DVD1334 | RON (seq. 2) | NGF (seq. 2) | 50.2 |
| DVD1335 | NGF (seq. 2) | CD-20 | 103.4 |
| DVD1336 | CD-20 | NGF (seq. 2) | 43.28 |
| DVD1337 | NGF (seq. 2) | EGFR (seq. 1) | 101.48 |
| DVD1338 | EGFR (seq. 1) | NGF (seq. 2) | 94.52 |
| DVD1339 | NGF (seq. 2) | HER2 | 109.4 |
| DVD1340 | HER2 | NGF (seq. 2) | 123.6 |
| DVD1349 | NGF (seq. 2) | c-MET | 0.11 |
| DVD1350 | c-MET | NGF (seq. 2) | 0 |
| DVD1351 | NGF (seq. 2) | NRP1 (seq 1) | 115.2 |
| DVD1352 | NRP1 (seq 1) | NGF (seq. 2) | 8.8 |
| DVD1361 | NGF (seq. 2) | ErbB3 (seq. 3) | 28.8 |
| DVD1362 | ErbB3 (seq. 3) | NGF (seq. 2) | 73.8 |
| DVD1369 | NGF (seq. 2) | EGFR (seq. 3) | 38.6 |
| DVD1370 | EGFR (seq. 3) | NGF (seq. 2) | 41.6 |

[0538] All DVDs expressed well in 293 cells. DVDs could be easily purified over a protein A column. In most cases >5 mg/L purified DVD-Ig could be obtained easily from supernatants of 293 cells.

### Example 1.4.5

### Characterization and Lead Selection of A/B DVD-Igs

[0539] The binding affinities of anti-A/B DVD-Igs are analyzed on Biacore against both protein A and protein B. The tetravalent property of the DVD-Ig is examined by multiple binding studies on Biacore. Meanwhile, the neutralization potency of the DVD-Igs for protein A and protein B are assessed by bioassays, respectively, as described herein. The DVD-Ig molecules that best retain the affinity and potency of the original parent mAbs are selected for in-depth physicochemical and bio-analytical (rat PK) characterizations as described herein for each mAb. Based on the collection of analyses, the final lead DVD-Ig is advanced into CHO stable cell line development, and the CHO-derived material is employed in stability, pharmacokinetic and efficacy studies in cynomolgus monkey, and preformulation activities.

### Example 2

### Generation and Characterization of Dual Variable Domain Immunoglobulins (DVD-Ig)

[0540] Dual variable domain immunoglobulins (DVD-Ig) using parent antibodies with known amino acid sequences were generated by synthesizing polynucleotide fragments encoding DVD-Ig variable heavy and DVD-Ig variable light chain sequences and cloning the fragments into a pHybC-D2 vector according to Example 1.4.4.1. The DVD-Ig constructs were cloned into and expressed in 293 cells as described in Example 1, 4.4.2. The DVD-Ig protein was purified according to standard methods. Functional characteristics were determined according to the methods described in Example 1.1.1 and 1.1.2 as indicated. DVD-Ig VH and VL chains for the DVD-Igs are provided below.

### Example 2.1

### Generation of NGF (seq. 2) and MTX DVD-Igs

TABLE 12

| | DVD | Outer | Inner | |
|---|---|---|---|---|
| SEQ | Variable | Variable | Variable | |
| ID | Domain | Domain | Domain | Sequence |
| NO | Name | Name | Name | 1234567890123456789012345678901234 |
| 96 | DVD1307H | AB118VH | AB119VH | EVQLVESGGGLVQPGGSLRLSCAASGFSLTNNNV |
| | | | | NWVRQAPGKGLEWVGGVWAGGATDYNSALKSRFT |
| | | | | ISRDNSKNTAYLQMNSLRAEDTAVYYCARDGGYS |
| | | | | SSTLYAMDAWGQGTLVTVSSASTKGPDVQLQESG |
| | | | | PGLVKPSQSLSLTCTVTGFSITSPYAWNWIRQFP |
| | | | | GNTLEWMGYISYRGSTTHHPSLKSRISITRDTSK |
| | | | | NQFFLQLNSVTTEDTATYFCSSYGNYGAYSGQGT |
| | | | | LVTVSA |
| 97 | DVD1307L | AB118VL | AB119VL | DIQMTQSPSSLSASVGDRVTITCRASEDIYNALA |
| | | | | WYQQKPGKAPKLLIYNTDTLHTGVPSRFSGSGSG |
| | | | | TDYTLTISSLQPEDFATYFCQHYFHYPRTFGQGT |
| | | | | KVEIKRTVAAPDVLLTQIPLSLPVSLGDQASISC |
| | | | | RSSQSIVHSNGNTYLEWYLQKPGQSPKLLIYKVS |
| | | | | TRFSGVPDRFSGSGSGTDFTLKISRVEAEDLGVY |
| | | | | YCFQGSHVPLTFGAGTQLELKR |
| 98 | DVD1308H | AB119VH | AB118VH | DVQLQESGPGLVKPSQSLSLTCTVTGFSITSPYA |
| | | | | WNWIRQFPGNTLEWMGYISYRGSTTHHPSLKSRI |
| | | | | SITRDTSKNQFFLQLNSVTTEDTATYFCSSYGNY |
| | | | | GAYSGQGTLVTVSAASTKGPEVQLVESGGGLVQP |
| | | | | GGSLRLSCAASGFSLTNNNVNWVRQAPGKGLEWV |
| | | | | GGVWAGGATDYNSALKSRFTISRDNSKNTAYLQM |
| | | | | NSLRAEDTAVYYCARDGGYSSSTLYAMDAWGQGT |
| | | | | LVTVSS |
| 99 | DVD1308L | AB119VL | AB118VL | DVLLTQIPLSLPVSLGDQASISCRSSQSIVHSNG |
| | | | | NTYLEWYLQKPGQSPKLLIYKVSTRFSGVPDRFS |
| | | | | GSGSGTDFTLKISRVEAEDLGVYYCFQGSHVPLT |
| | | | | FGAGTQLELKRTVAAPDIQMTQSPSSLSASVGDR |
| | | | | VTITCRASEDIYNALAWYQQKPGKAPKLLIYNTD |
| | | | | TLHTGVPSRFSGSGSGTDYTLTISSLQPEDFATY |
| | | | | FCQHYFHYPRTFGQGTKVEIKR |

### Example 2.2

### Generation of NGF (seq. 2) and NKG2D DVD-Igs

TABLE 13

| | DVD | Outer | Inner | |
|---|---|---|---|---|
| SEQ | Variable | Variable | Variable | |
| ID | Domain | Domain | Domain | Sequence |
| NO | Name | Name | Name | 1234567890123456789012345678901234 |
| 100 | DVD1309H | AB118VH | AB121VH | EVQLVESGGGLVQPGGSLRLSCAASGFSLTNNNV |
| | | | | NWVRQAPGKGLEWVGGVWAGGATDYNSALKSRFT |
| | | | | ISRDNSKNTAYLQMNSLRAEDTAVYYCARDGGYS |
| | | | | SSTLYAMDAWGQGTLVTVSSASTKGPQVQLVESG |
| | | | | GGLVKPGGSLRLSCAASGFTFSSYGMHWVRQAPG |
| | | | | KGLEWVAFIRYDGSNKYYADSVKGRFTISRDNSK |
| | | | | NTLYLQMNSLRAEDTAVYYCAKDRGLGDGTYFDY |
| | | | | WGQGTTVTVSS |
| 101 | DVD1309L | AB118VL | AB121VL | DIQMTQSPSSLSASVGDRVTITCRASEDIYNALA |
| | | | | WYQQKPGKAPKLLIYNTDTLHTGVPSRFSGSGSG |
| | | | | TDYTLTISSLQPEDFATYFCQHYFHYPRTFGQGT |
| | | | | KVEIKRTVAAPQSALTQPASVSGSPGQSITISCS |
| | | | | GSSSNIGNNAVNWYQQLPGKAPKLLIYYDDLLPS |
| | | | | GVSDRFSGSKSGTSAFLAISGLQSEDEADYYCAA |
| | | | | WDDSLNGPVFGGGTKLTVLG |
| 102 | DVD1310H | AB121VH | AB118VH | QVQLVESGGGLVKPGGSLRLSCAASGFTFSSYGM |
| | | | | HWVRQAPGKGLEWVAFIRYDGSNKYYADSVKGRF |
| | | | | TISRDNSKNTLYLQMNSLRAEDTAVYYCAKDRGL |
| | | | | GDGTYFDYWGQGTTVTVSSASTKGPEVQLVESGG |
| | | | | GLVQPGGSLRLSCAASGFSLTNNNVNWVRQAPGK |
| | | | | GLEWVGGVWAGGATDYNSALKSRFTISRDNSKNT |
| | | | | AYLQMNSLRAEDTAVYYCARDGGYSSSTLYAMDA |
| | | | | WGQGTLVTVSS |
| 103 | DVD1310L | AB121VL | AB118VL | QSALTQPASVSGSPGQSITISCSGSSSNIGNNAV |
| | | | | NWYQQLPGKAPKLLIYYDDLLPSGVSDRFSGSKS |
| | | | | GTSAFLAISGLQSEDEADYYCAAWDDSLNGPVFG |
| | | | | GGTKLTVLGQPKAAPDIQMTQSPSSLSASVGDRV |
| | | | | TITCRASEDIYNALAWYQQKPGKAPKLLIYNTDT |
| | | | | LHTGVPSRFSGSGSGTDYTLTISSLQPEDFATYF |
| | | | | CQHYFHYPRTFGQGTKVEIKR |

### Example 2.3

### Generation of NGF (seq. 2) and EGFR (seq. 2) DVD-Igs

TABLE 14

| | DVD | Outer | Inner | |
|---|---|---|---|---|
| SEQ | Variable | Variable | Variable | |
| ID | Domain | Domain | Domain | Sequence |
| NO | Name | Name | Name | 1234567890123456789012345678901234 |
| 104 | DVD1311H | AB118VH | AB033VH | EVQLVESGGGLVQPGGSLRLSCAASGFSLTNNNV |
| | | | | NWVRQAPGKGLEWVGGVWAGGATDYNSALKSRFT |
| | | | | ISRDNSKNTAYLQMNSLRAEDTAVYYCARDGGYS |
| | | | | SSTLYAMDAWGQGTLVTVSSASTKGPQVQLKQSG |
| | | | | PGLVQPSQSLSITCTVSGFSLTNYGVHWVRQSPG |
| | | | | KGLEWLGVIWSGGNTDYNTPFTSRLSINKDNSKS |
| | | | | QVFFKMNSLQSNDTAIYYCARALTYYDYEFAYWG |
| | | | | QGTLVTVSA |
| 105 | DVD1311L | AB118VL | AB033VL | DIQMTQSPSSLSASVGDRVTITCRASEDIYNALA |
| | | | | WYQQKPGKAPKLLIYNTDTLHTGVPSRFSGSGSG |
| | | | | TDYTLTISSLQPEDFATYFCQHYFHYPRTFGQGT |
| | | | | KVEIKRTVAAPDILLTQSPVILSVSPGERVSFSC |
| | | | | RASQSIGTNIHWYQQRTNGSPRLLIKYASESISG |
| | | | | IPSRFSGSGSGTDFTLSINSVESEDIADYYCQQN |
| | | | | NNWPTTFGAGTKLELKR |
| 106 | DVD1312H | AB033VH | AB118VH | QVQLKQSGPGLVQPSQSLSITCTVSGFSLTNYGV |
| | | | | HWVRQSPGKGLEWLGVIWSGGNTDYNTPFTSRLS |
| | | | | INKDNSKSQVFFKMNSLQSNDTAIYYCARALTYY |
| | | | | DYEFAYWGQGTLVTVSAASTKGPEVQLVESGGGL |
| | | | | VQPGGSLRLSCAASGFSLTNNNVNWVRQAPGKGL |
| | | | | EWVGGVWAGGATDYNSALKSRFTISRDNSKNTAY |
| | | | | LQMNSLRAEDTAVYYCARDGGYSSSTLYAMDAWG |
| | | | | QGTLVTVSS |
| 107 | DVD1312L | AB033VL | AB118VL | DILLTQSPVILSVSPGERVSFSCRASQSIGTNIH |
| | | | | WYQQRTNGSPRLLIKYASESISGIPSRFSGSGSG |
| | | | | TDFTLSINSVESEDIADYYCQQNNNWPTTFGAGT |
| | | | | KLELKRTVAAPDIQMTQSPSSLSASVGDRVTITC |
| | | | | RASEDIYNALAWYQQKPGKAPKLLIYNTDTLHTG |
| | | | | VPSRFSGSGSGTDYTLTISSLQPEDFATYFCQHY |
| | | | | FHYPRTFGQGTKVEIKR |

### Example 2.4

### Generation of NGF (seq. 2) and IGF1,2 DVD-Igs

TABLE 15

| | DVD | Outer | Inner | |
|---|---|---|---|---|
| SEQ | Variable | Variable | Variable | |
| ID | Domain | Domain | Domain | Sequence |
| NO | Name | Name | Name | 1234567890123456789012345678901234 |
| 108 | DVD1313H | AB118VH | AB010VH | EVQLVESGGGLVQPGGSLRLSCAASGFSLTNNNV |
| | | | | NWVRQAPGKGLEWVGGVWAGGATDYNSALKSRFT |
| | | | | ISRDNSKNTAYLQMNSLRAEDTAVYYCARDGGYS |
| | | | | SSTLYAMDAWGQGTLVTVSSASTKGPQVQLVQSG |
| | | | | AEVKKPGASVKVSCKASGYTFTSYDINWVRQATG |
| | | | | QGLEWMGWMNPNSGNTGYAQKFQGRVTMTRNTSI |
| | | | | STAYMELSSLRSEDTAVYYCARDPYYYYYGMDVW |
| | | | | GQGTTVTVSS |
| 109 | DVD1313L | AB118VL | AB010VL | DIQMTQSPSSLSASVGDRVTITCRASEDIYNALA |
| | | | | WYQQKPGKAPKLLIYNTDTLHTGVPSRFSGSGSG |
| | | | | TDYTLTISSLQPEDFATYFCQHYFHYPRTFGQGT |
| | | | | KVEIKRTVAAPQSVLTQPPSVSAAPGQKVTISCS |
| | | | | GSSSNIENNHVSWYQQLPGTAPKLLIYDNNKRPS |
| | | | | GIPDRFSGSKSGTSATLGITGLQTGDEADYYCET |
| | | | | WDTSLSAGRVFGGGTKLTVLG |
| 110 | DVD1314H | AB010VH | AB118VH | QVQLVQSGAEVKKPGASVKVSCKASGYTFTSYDI |
| | | | | NWVRQATGQGLEWMGWMNPNSGNTGYAQKFQGRV |
| | | | | TMTRNTSISTAYMELSSLRSEDTAVYYCARDPYY |
| | | | | YYYGMDVWGQGTTVTVSSASTKGPEVQLVESGGG |
| | | | | LVQPGGSLRLSCAASGFSLTNNNVNWVRQAPGKG |
| | | | | LEWVGGVWAGGATDYNSALKSRFTISRDNSKNTA |
| | | | | YLQMNSLRAEDTAVYYCARDGGYSSSTLYAMDAW |
| | | | | GQGTLVTVSS |
| 111 | DVD1314L | AB010VL | AB118VL | QSVLTQPPSVSAAPGQKVTISCSGSSSNIENNHV |
| | | | | SWYQQLPGTAPKLLIYDNNKRPSGIPDRFSGSKS |
| | | | | GTSATLGITGLQTGDEADYYCETWDTSLSAGRVF |
| | | | | GGGTKLTVLGQPKAAPDIQMTQSPSSLSASVGDR |
| | | | | VTITCRASEDIYNALAWYQQKPGKAPKLLIYNTD |
| | | | | TLHTGVPSRFSGSGSGTDYTLTISSLQPEDFATY |
| | | | | FCQHYFHYPRTFGQGTKVEIKR |

### Example 2.5

### Generation of NGF (seq. 2) and RON (seq. 1) DVD-Igs

TABLE 16

| | DVD | Outer | Inner | |
|---|---|---|---|---|
| SEQ | Variable | Variable | Variable | |
| ID | Domain | Domain | Domain | Sequence |
| NO | Name | Name | Name | 1234567890123456789012345678901234 |
| 112 | DVD1315H | AB118VH | AB005VH | EVQLVESGGGLVQPGGSLRLSCAASGFSLTNNNV |
| | | | | NWVRQAPGKGLEWVGGVWAGGATDYNSALKSRFT |
| | | | | ISRDNSKNTAYLQMNSLRAEDTAVYYCARDGGYS |
| | | | | SSTLYAMDAWGQGTLVTVSSASTKGPEVQLVQSG |
| | | | | GGLVKPGGSLRLSCAASGFTFSSYAMHWVRQAPG |
| | | | | KGLEWVAVISYDGSNKYYADSVKGRFTISRDNSK |
| | | | | NTLYLQMNSLRAEDTAVYYCARFSGWPNNYYYYG |
| | | | | MDVWGQGTTVTVSS |
| 113 | DVD1315L | AB118VL | AB005VL | DIQMTQSPSSLSASVGDRVTITCRASEDIYNALA |
| | | | | WYQQKPGKAPKLLIYNTDTLHTGVPSRFSGSGSG |
| | | | | TDYTLTISSLQPEDFATYFCQHYFHYPRTFGQGT |
| | | | | KVEIKRTVAAPDVVMTQSPLSLPVTPGEPASISC |
| | | | | RSSQSLLHSNGFNYVDWYLQKPGQSPHLLIYFGS |
| | | | | YRASGVPDRFSGSGSGTDFTLKISRVEAEDVGVY |
| | | | | YCMQALQTPPWTFGQGTKVEIRR |
| 114 | DVD1316H | AB005VH | AB118VH | EVQLVQSGGGLVKPGGSLRLSCAASGFTFSSYAM |
| | | | | HWVRQAPGKGLEWVAVISYDGSNKYYADSVKGRF |
| | | | | TISRDNSKNTLYLQMNSLRAEDTAVYYCARFSGW |
| | | | | PNNYYYYGMDVWGQGTTVTVSSASTKGPEVQLVE |
| | | | | SGGGLVQPGGSLRLSCAASGFSLTNNNVNWVRQA |
| | | | | PGKGLEWVGGVWAGGATDYNSALKSRFTISRDNS |
| | | | | KNTAYLQMNSLRAEDTAVYYCARDGGYSSSTLYA |
| | | | | MDAWGQGTLVTVSS |
| 115 | DVD1316L | AB005VL | AB118VL | DVVMTQSPLSLPVTPGEPASISCRSSQSLLHSNG |
| | | | | FNYVDWYLQKPGQSPHLLIYFGSYRASGVPDRFS |
| | | | | GSGSGTDFTLKISRVEAEDVGVYYCMQALQTPPW |
| | | | | TFGQGTKVEIRRTVAAPDIQMTQSPSSLSASVGD |
| | | | | RVTITCRASEDIYNALAWYQQKPGKAPKLLIYNT |
| | | | | DTLHTGVPSRFSGSGSGTDYTLTISSLQPEDFAT |
| | | | | YFCQHYFHYPRTFGQGTKVEIKR |

### Example 2.6

### Generation of NGF (seq. 2) and ErbB3 (seq. 1) DVD-Igs

TABLE 17

| | DVD | Outer | Inner | |
|---|---|---|---|---|
| SEQ | Variable | Variable | Variable | |
| ID | Domain | Domain | Domain | Sequence |
| NO | Name | Name | Name | 1234567890123456789012345678901234 |
| 116 | DVD1317H | AB118VH | AB062VH | EVQLVESGGGLVQPGGSLRLSCAASGFSLTNNNV |
| | | | | NWVRQAPGKGLEWVGGVWAGGATDYNSALKSRFT |
| | | | | ISRDNSKNTAYLQMNSLRAEDTAVYYCARDGGYS |
| | | | | SSTLYAMDAWGQGTLVTVSSASTKGPQVQLQQWG |
| | | | | AGLLKPSETLSLTCAVYGGSFSGYYWSWIRQPPG |
| | | | | KGLEWIGEINHSGSTNYNPSLKSRVTISVETSKN |
| | | | | QFSLKLSSVTAADTAVYYCARDKWTWYFDLWGRG |
| | | | | TLVTVSS |
| 117 | DVD1317L | AB118VL | AB062VL | DIQMTQSPSSLSASVGDRVTITCRASEDIYNALA |
| | | | | WYQQKPGKAPKLLIYNTDTLHTGVPSRFSGSGSG |
| | | | | TDYTLTISSLQPEDFATYFCQHYFHYPRTFGQGT |
| | | | | KVEIKRTVAAPDIEMTQSPDSLAVSLGERATINC |
| | | | | RSSQSVLYSSSNRNYLAWYQQNPGQPPKLLIYWA |
| | | | | STRESGVPDRFSGSGSGTDFTLTISSLQAEDVAV |
| | | | | YYCQQYYSTPRTFGQGTKVEIKR |
| 118 | DVD1318H | AB062VH | AB118VH | QVQLQQWGAGLLKPSETLSLTCAVYGGSFSGYYW |
| | | | | SWIRQPPGKGLEWIGEINHSGSTNYNPSLKSRVT |
| | | | | ISVETSKNQFSLKLSSVTAADTAVYYCARDKWTW |
| | | | | YFDLWGRGTLVTVSSASTKGPEVQLVESGGGLVQ |
| | | | | PGGSLRLSCAASGFSLTNNNVNWVRQAPGKGLEW |
| | | | | VGGVWAGGATDYNSALKSRFTISRDNSKNTAYLQ |
| | | | | MNSLRAEDTAVYYCARDGGYSSSTLYAMDAWGQG |
| | | | | TLVTVSS |
| 119 | DVD1318L | AB062VL | AB118VL | DIEMTQSPDSLAVSLGERATINCRSSQSVLYSSS |
| | | | | NRNYLAWYQQNPGQPPKLLIYWASTRESGVPDRF |
| | | | | SGSGSGTDFTLTISSLQAEDVAVYYCQQYYSTPR |
| | | | | TFGQGTKVEIKRTVAAPDIQMTQSPSSLSASVGD |
| | | | | RVTITCRASEDIYNALAWYQQKPGKAPKLLIYNT |
| | | | | DTLHTGVPSRFSGSGSGTDYTLTISSLQPEDFAT |
| | | | | YFCQHYFHYPRTFGQGTKVEIKR |

### Example 2.7

### Generation of NGF (seq. 2) and ErbB3 (seq. 2) DVD-Igs

TABLE 18

| | DVD | Outer | Inner | |
|---|---|---|---|---|
| SEQ | Variable | Variable | Variable | |
| ID | Domain | Domain | Domain | Sequence |
| NO | Name | Name | Name | 1234567890123456789012345678901234 |
| 120 | DVD1319H | AB118VH | AB063VH | EVQLVESGGGLVQPGGSLRLSCAASGFSLTNNNV |
| | | | | NWVRQAPGKGLEWVGGVWAGGATDYNSALKSRFT |
| | | | | ISRDNSKNTAYLQMNSLRAEDTAVYYCARDGGYS |
| | | | | SSTLYAMDAWGQGTLVTVSSASTKGPEVQLVESG |
| | | | | GGLVQPGGSLRLSCAASGFTFSIYSMNWVRQAPG |
| | | | | KGLEWVSYISSSSSTIYYADSVKGRFTISRDNAK |
| | | | | NSLYLQMNSLRDEDTAVYYCARDRGDFDAFDIWG |
| | | | | QGTMVTVSS |
| 121 | DVD1319L | AB118VL | AB063VL | DIQMTQSPSSLSASVGDRVTITCRASEDIYNALA |
| | | | | WYQQKPGKAPKLLIYNTDTLHTGVPSRFSGSGSG |
| | | | | TDYTLTISSLQPEDFATYFCQHYFHYPRTFGQGT |
| | | | | KVEIKRTVAAPDIQMTQSPSSLSASVGDRVTITC |
| | | | | QASQDITNYLNWYQQKPGKAPKLLIYDASNLETG |
| | | | | VPSRFSGSGSGTDFTFTISSLQPEDIATYNCQQC |
| | | | | ENFPITFGQGTRLEIKR |
| 122 | DVD1320H | AB063VH | AB118VH | EVQLVESGGGLVQPGGSLRLSCAASGFTFSIYSM |
| | | | | NWVRQAPGKGLEWVSYISSSSSTIYYADSVKGRF |
| | | | | TISRDNAKNSLYLQMNSLRDEDTAVYYCARDRGD |
| | | | | FDAFDIWGQGTMVTVSSASTKGPEVQLVESGGGL |
| | | | | VQPGGSLRLSCAASGFSLTNNNVNWVRQAPGKGL |
| | | | | EWVGGVWAGGATDYNSALKSRFTISRDNSKNTAY |
| | | | | LQMNSLRAEDTAVYYCARDGGYSSSTLYAMDAWG |
| | | | | QGTLVTVSS |
| 123 | DVD1320L | AB063VL | AB118VL | DIQMTQSPSSLSASVGDRVTITCQASQDITNYLN |
| | | | | WYQQKPGKAPKLLIYDASNLETGVPSRFSGSGSG |
| | | | | TDFTFTISSLQPEDIATYNCQQCENFPITFGQGT |
| | | | | RLEIKRTVAAPDIQMTQSPSSLSASVGDRVTITC |
| | | | | RASEDIYNALAWYQQKPGKAPKLLIYNTDTLHTG |
| | | | | VPSRFSGSGSGTDYTLTISSLQPEDFATYFCQHY |
| | | | | FHYPRTFGQGTKVEIKR |

### Example 2.8

### Generation of NGF (seq. 2) and CD-3 (seq. 1) DVD-Igs

TABLE 19

| | DVD | Outer | Inner | |
|---|---|---|---|---|
| SEQ | Variable | Variable | Variable | |
| ID | Domain | Domain | Domain | Sequence |
| NO | Name | Name | Name | 1234567890123456789012345678901234 |
| 124 | DVD1321H | AB118VH | AB002VH | EVQLVESGGGLVQPGGSLRLSCAASGFSLTNNNV |
| | | | | NWVRQAPGKGLEWVGGVWAGGATDYNSALKSRFT |
| | | | | ISRDNSKNTAYLQMNSLRAEDTAVYYCARDGGYS |
| | | | | SSTLYAMDAWGQGTLVTVSSASTKGPQVQLQQSG |
| | | | | AELARPGASVKMSCKASGYTFTRYTMHWVKQRPG |
| | | | | QGLEWIGYINPSRGYTNYNQKFKDKATLTTDKSS |
| | | | | STAYMQLSSLTSEDSAVYYCARYYDDHYCLDYWG |
| | | | | QGTTLTVSS |
| 125 | DVD1321L | AB118VL | AB002VL | DIQMTQSPSSLSASVGDRVTITCRASEDIYNALA |
| | | | | WYQQKPGKAPKLLIYNTDTLHTGVPSRFSGSGSG |
| | | | | TDYTLTISSLQPEDFATYFCQHYFHYPRTFGQGT |
| | | | | KVEIKRTVAAPQIVLTQSPAIMSASPGEKVTMTC |
| | | | | RASSSVSYMNWYQQKSGTSPKRWIYDTSKVASGV |
| | | | | PYRFSGSGSGTSYSLTISSMEAEDAATYYCQQWS |
| | | | | SNPLTFGSGTKLEINR |
| 126 | DVD1322H | AB002VH | AB118VH | QVQLQQSGAELARPGASVKMSCKASGYTFTRYTM |
| | | | | HWVKQRPGQGLEWIGYINPSRGYTNYNQKFKDKA |
| | | | | TLTTDKSSSTAYMQLSSLTSEDSAVYYCARYYDD |
| | | | | HYCLDYWGQGTTLTVSSASTKGPEVQLVESGGGL |
| | | | | VQPGGSLRLSCAASGFSLTNNNVNWVRQAPGKGL |
| | | | | EWVGGVWAGGATDYNSALKSRFTISRDNSKNTAY |
| | | | | LQMNSLRAEDTAVYYCARDGGYSSSTLYAMDAWG |
| | | | | QGTLVTVSS |
| 127 | DVD1322L | AB002VL | AB118VL | QIVLTQSPAIMSASPGEKVTMTCRASSSVSYMNW |
| | | | | YQQKSGTSPKRWIYDTSKVASGVPYRFSGSGSGT |
| | | | | SYSLTISSMEAEDAATYYCQQWSSNPLTFGSGTK |
| | | | | LEINRTVAAPDIQMTQSPSSLSASVGDRVTITCR |
| | | | | ASEDIYNALAWYQQKPGKAPKLLIYNTDTLHTGV |
| | | | | PSRFSGSGSGTDYTLTISSLQPEDFATYFCQHYF |
| | | | | HYPRTFGQGTKVEIKR |

### Example 2.9

### Generation of NGF (seq. 2) and IGFR DVD-Igs

TABLE 20

| | DVD | Outer | Inner | |
|---|---|---|---|---|
| SEQ | Variable | Variable | Variable | |
| ID | Domain | Domain | Domain | Sequence |
| NO | Name | Name | Name | 1234567890123456789012345678901234 |
| 128 | DVD1323H | AB118VH | AB011VH | EVQLVESGGGLVQPGGSLRLSCAASGFSLTNNNV |
| | | | | NWVRQAPGKGLEWVGGVWAGGATDYNSALKSRFT |
| | | | | ISRDNSKNTAYLQMNSLRAEDTAVYYCARDGGYS |
| | | | | SSTLYAMDAWGQGTLVTVSSASTKGPEVQLLESG |
| | | | | GGLVQPGGSLRLSCTASGFTFSSYAMNWVRQAPG |
| | | | | KGLEWVSAISGSGGTTFYADSVKGRFTISRDNSR |
| | | | | TTLYLQMNSLRAEDTAVYYCAKDLGWSDSYYYYY |
| | | | | GMDVWGQGTTVTVSS |
| 129 | DVD1323L | AB118VL | AB011VL | DIQMTQSPSSLSASVGDRVTITCRASEDIYNALA |
| | | | | WYQQKPGKAPKLLIYNTDTLHTGVPSRFSGSGSG |
| | | | | TDYTLTISSLQPEDFATYFCQHYFHYPRTFGQGT |
| | | | | KVEIKRTVAAPDIQMTQFPSSLSASVGDRVTITC |
| | | | | RASQGIRNDLGWYQQKPGKAPKRLIYAASRLHRG |
| | | | | VPSRFSGSGSGTEFTLTISSLQPEDFATYYCLQH |
| | | | | NSYPCSFGQGTKLEIKR |
| 130 | DVD1324H | AB011VH | AB118VH | EVQLLESGGGLVQPGGSLRLSCTASGFTFSSYAM |
| | | | | NWVRQAPGKGLEWVSAISGSGGTTFYADSVKGRF |
| | | | | TISRDNSRTTLYLQMNSLRAEDTAVYYCAKDLGW |
| | | | | SDSYYYYYGMDVWGQGTTVTVSSASTKGPEVQLV |
| | | | | ESGGGLVQPGGSLRLSCAASGFSLTNNNVNWVRQ |
| | | | | APGKGLEWVGGVWAGGATDYNSALKSRFTISRDN |
| | | | | SKNTAYLQMNSLRAEDTAVYYCARDGGYSSSTLY |
| | | | | AMDAWGQGTLVTVSS |
| 131 | DVD1324L | AB011VL | AB118VL | DIQMTQFPSSLSASVGDRVTITCRASQGIRNDLG |
| | | | | WYQQKPGKAPKRLIYAASRLHRGVPSRFSGSGSG |
| | | | | TEFTLTISSLQPEDFATYYCLQHNSYPCSFGQGT |
| | | | | KLEIKRTVAAPDIQMTQSPSSLSASVGDRVTITC |
| | | | | RASEDIYNALAWYQQKPGKAPKLLIYNTDTLHTG |
| | | | | VPSRFSGSGSGTDYTLTISSLQPEDFATYFCQHY |
| | | | | FHYPRTFGQGTKVEIKR |

### Example 2.10

### Generation of NGF (seq. 2) and HGF DVD-Igs

TABLE 21

| | DVD | Outer | Inner | |
|---|---|---|---|---|
| SEQ | Variable | Variable | Variable | |
| ID | Domain | Domain | Domain | Sequence |
| NO | Name | Name | Name | 1234567890123456789012345678901234 |
| 132 | DVD1325H | AB118VH | AB012VH | EVQLVESGGGLVQPGGSLRLSCAASGFSLTNNNV |
| | | | | NWVRQAPGKGLEWVGGVWAGGATDYNSALKSRFT |
| | | | | ISRDNSKNTAYLQMNSLRAEDTAVYYCARDGGYS |
| | | | | SSTLYAMDAWGQGTLVTVSSASTKGPQVQLVESG |
| | | | | GGLVKPGGSLRLSCAASGFTFSDYYMSWIRQAPG |
| | | | | KGLEWVSYISSSGSTIYYADSVKGRFTISRDNAK |
| | | | | NSLYLQMNSLRAEDTAVYYCARDEYNSGWYVLFD |
| | | | | YWGQGTLVTVSS |
| 133 | DVD1325L | AB118VL | AB012VL | DIQMTQSPSSLSASVGDRVTITCRASEDIYNALA |
| | | | | WYQQKPGKAPKLLIYNTDTLHTGVPSRFSGSGSG |
| | | | | TDYTLTISSLQPEDFATYFCQHYFHYPRTFGQGT |
| | | | | KVEIKRTVAAPDIQMTQSPSSVSASVGDRVTITC |
| | | | | RASQGISSWLAWYQQKPGKAPNLLIYEASSLQSG |
| | | | | VPSRFGGSGSGTDFTLTISSLQPEDFATYYCQQA |
| | | | | NGFPWTFGQGTKVEIKR |
| 134 | DVD1326H | AB012VH | AB118VH | QVQLVESGGGLVKPGGSLRLSCAASGFTFSDYYM |
| | | | | SWIRQAPGKGLEWVSYISSSGSTIYYADSVKGRF |
| | | | | TISRDNAKNSLYLQMNSLRAEDTAVYYCARDEYN |
| | | | | SGWYVLFDYWGQGTLVTVSSASTKGPEVQLVESG |
| | | | | GGLVQPGGSLRLSCAASGFSLTNNNVNWVRQAPG |
| | | | | KGLEWVGGVWAGGATDYNSALKSRFTISRDNSKN |
| | | | | TAYLQMNSLRAEDTAVYYCARDGGYSSSTLYAMD |
| | | | | AWGQGTLVTVSS |
| 135 | DVD1326L | AB012VL | AB118VL | DIQMTQSPSSVSASVGDRVTITCRASQGISSWLA |
| | | | | WYQQKPGKAPNLLIYEASSLQSGVPSRFGGSGSG |
| | | | | TDFTLTISSLQPEDFATYYCQQANGFPWTFGQGT |
| | | | | KVEIKRTVAAPDIQMTQSPSSLSASVGDRVTITC |
| | | | | RASEDIYNALAWYQQKPGKAPKLLIYNTDTLHTG |
| | | | | VPSRFSGSGSGTDYTLTISSLQPEDFATYFCQHY |
| | | | | FHYPRTFGQGTKVEIKR |

### Example 2.11

### Generation of NGF (seq. 2) and VEGF (seq. 1) DVD-Igs

TABLE 22

| | DVD | Outer | Inner | |
|---|---|---|---|---|
| SEQ | Variable | Variable | Variable | |
| ID | Domain | Domain | Domain | Sequence |
| NO | Name | Name | Name | 1234567890123456789012345678901234 |
| 136 | DVD1327H | AB118VH | AB014VH | EVQLVESGGGLVQPGGSLRLSCAASGFSLTNNNV |
| | | | | NWVRQAPGKGLEWVGGVWAGGATDYNSALKSRFT |
| | | | | ISRDNSKNTAYLQMNSLRAEDTAVYYCARDGGYS |
| | | | | SSTLYAMDAWGQGTLVTVSSASTKGPEVQLVESG |
| | | | | GGLVQPGGSLRLSCAASGYTFTNYGMNWVRQAPG |
| | | | | KGLEWVGWINTYTGEPTYAADFKRRFTFSLDTSK |
| | | | | STAYLQMNSLRAEDTAVYYCAKYPHYYGSSHWYF |
| | | | | DVWGQGTLVTVSS |
| 137 | DVD1327L | AB118VL | AB014VL | DIQMTQSPSSLSASVGDRVTITCRASEDIYNALA |
| | | | | WYQQKPGKAPKLLIYNTDTLHTGVPSRFSGSGSG |
| | | | | TDYTLTISSLQPEDFATYFCQHYFHYPRTFGQGT |
| | | | | KVEIKRTVAAPDIQMTQSPSSLSASVGDRVTITC |
| | | | | SASQDISNYLNWYQQKPGKAPKVLIYFTSSLHSG |
| | | | | VPSRFSGSGSGTDFTLTISSLQPEDFATYYCQQY |
| | | | | STVPWTFGQGTKVEIKR |
| 138 | DVD1328H | AB014VH | AB118VH | EVQLVESGGGLVQPGGSLRLSCAASGYTFTNYGM |
| | | | | NWVRQAPGKGLEWVGWINTYTGEPTYAADFKRRF |
| | | | | TFSLDTSKSTAYLQMNSLRAEDTAVYYCAKYPHY |
| | | | | YGSSHWYFDVWGQGTLVTVSSASTKGPEVQLVES |
| | | | | GGGLVQPGGSLRLSCAASGFSLTNNNVNWVRQAP |
| | | | | GKGLEWVGGVWAGGATDYNSALKSRFTISRDNSK |
| | | | | NTAYLQMNSLRAEDTAVYYCARDGGYSSSTLYAM |
| | | | | DAWGQGTLVTVSS |
| 139 | DVD1328L | AB014VL | AB118VL | DIQMTQSPSSLSASVGDRVTITCSASQDISNYLN |
| | | | | WYQQKPGKAPKVLIYFTSSLHSGVPSRFSGSGSG |
| | | | | TDFTLTISSLQPEDFATYYCQQYSTVPWTFGQGT |
| | | | | KVEIKRTVAAPDIQMTQSPSSLSASVGDRVTITC |
| | | | | RASEDIYNALAWYQQKPGKAPKLLIYNTDTLHTG |
| | | | | VPSRFSGSGSGTDYTLTISSLQPEDFATYFCQHY |
| | | | | FHYPRTFGQGTKVEIKR |

### Example 2.12

### Generation of NGF (seq. 2) and DLL4 DVD-Igs

TABLE 23

| | DVD | Outer | Inner | |
|---|---|---|---|---|
| SEQ | Variable | Variable | Variable | |
| ID | Domain | Domain | Domain | Sequence |
| NO | Name | Name | Name | 1234567890123456789012345678901234 |
| 140 | DVD1329H | AB118VH | AB015VH | EVQLVESGGGLVQPGGSLRLSCAASGFSLTNNNV |
| | | | | NWVRQAPGKGLEWVGGVWAGGATDYNSALKSRFT |
| | | | | ISRDNSKNTAYLQMNSLRAEDTAVYYCARDGGYS |
| | | | | SSTLYAMDAWGQGTLVTVSSASTKGPEVQLVESG |
| | | | | GGLVQPGGSLRLSCAASGFTFTDNWISWVRQAPG |
| | | | | KGLEWVGYISPNSGFTYYADSVKGRFTISADTSK |
| | | | | NTAYLQMNSLRAEDTAVYYCARDNFGGYFDYWGQ |
| | | | | GTLVTVSS |
| 141 | DVD1329L | AB118VL | AB015VL | DIQMTQSPSSLSASVGDRVTITCRASEDIYNALA |
| | | | | WYQQKPGKAPKLLIYNTDTLHTGVPSRFSGSGSG |
| | | | | TDYTLTISSLQPEDFATYFCQHYFHYPRTFGQGT |
| | | | | KVEIKRTVAAPDIQMTQSPSSLSASVGDRVTITC |
| | | | | RASQDVSTAVAWYQQKPGKAPKLLIYSASFLYSG |
| | | | | VPSRFSGSGSGTDFTLTISSLQPEDFATTYYCQQ |
| | | | | SYTGTVTFGQGTKVEIKR |
| 142 | DVD1330H | AB015VH | AB118VH | EVQLVESGGGLVQPGGSLRLSCAASGFTFTDNWI |
| | | | | SWVRQAPGKGLEWVGYISPNSGFTYYADSVKGRF |
| | | | | TISADTSKNTAYLQMNSLRAEDTAVYYCARDNFG |
| | | | | GYFDYWGQGTLVTVSSASTKGPEVQLVESGGGLV |
| | | | | QPGGSLRLSCAASGFSLTNNNVNWVRQAPGKGLE |
| | | | | WVGGVWAGGATDYNSALKSRFTISRDNSKNTAYL |
| | | | | QMNSLRAEDTAVYYCARDGGYSSSTLYAMDAWGQ |
| | | | | GTLVTVSS |
| 143 | DVD1330L | AB015VL | AB118VL | DIQMTQSPSSLSASVGDRVTITCRASQDVSTAVA |
| | | | | WYQQKPGKAPKLLIYSASFLYSGVPSRFSGSGSG |
| | | | | TDFTLTISSLQPEDFATTYYCQQSYTGTVTFGQG |
| | | | | TKVEIKRTVAAPDIQMTQSPSSLSASVGDRVTIT |
| | | | | CRASEDIYNALAWYQQKPGKAPKLLIYNTDTLHT |
| | | | | GVPSRFSGSGSGTDYTLTISSLQPEDFATYFCQH |
| | | | | YFHYPRTFGQGTKVEIKR |

### Example 2.13

### Generation of NGF (seq. 2) and P1GF DVD-Igs

TABLE 24

| | DVD | Outer | Inner | |
|---|---|---|---|---|
| SEQ | Variable | Variable | Variable | |
| ID | Domain | Domain | Domain | Sequence |
| NO | Name | Name | Name | 1234567890123456789012345678901234 |
| 144 | DVD1331H | AB118VH | AB047VH | EVQLVESGGGLVQPGGSLRLSCAASGFSLTNNNV |
| | | | | NWVRQAPGKGLEWVGGVWAGGATDYNSALKSRFT |
| | | | | ISRDNSKNTAYLQMNSLRAEDTAVYYCARDGGYS |
| | | | | SSTLYAMDAWGQGTLVTVSSASTKGPQVQLQQSG |
| | | | | AELVKPGASVKISCKASGYTFTDYYINWVKLAPG |
| | | | | QGLEWIGWIYPGSGNTKYNEKFKGKATLTIDTSS |
| | | | | STAYMQLSSLTSEDTAVYFCVRDSPFFDYWGQGT |
| | | | | LLTVSS |
| 145 | DVD1331L | AB118VL | AB047VL | DIQMTQSPSSLSASVGDRVTITCRASEDIYNALA |
| | | | | WYQQKPGKAPKLLIYNTDTLHTGVPSRFSGSGSG |
| | | | | TDYTLTISSLQPEDFATYFCQHYFHYPRTFGQGT |
| | | | | KVEIKRTVAAPDIVLTQSPDSLAVSLGERVTMNC |
| | | | | KSSQSLLNSGMRKSFLAWYQQKPGQSPKLLIYWA |
| | | | | STRESGVPDRFTGSGSGTDFTLTISSVQAEDVAV |
| | | | | YYCKQSYHLFTFGSGTKLEIKR |
| 146 | DVD1332H | AB047VH | AB118VH | QVQLQQSGAELVKPGASVKISCKASGYTFTDYYI |
| | | | | NWVKLAPGQGLEWIGWIYPGSGNTKYNEKFKGKA |
| | | | | TLTIDTSSSTAYMQLSSLTSEDTAVYFCVRDSPF |
| | | | | FDYWGQGTLLTVSSASTKGPEVQLVESGGGLVQP |
| | | | | GGSLRLSCAASGFSLTNNNVNWVRQAPGKGLEWV |
| | | | | GGVWAGGATDYNSALKSRFTISRDNSKNTAYLQM |
| | | | | NSLRAEDTAVYYCARDGGYSSSTLYAMDAWGQGT |
| | | | | LVTVSS |
| 147 | DVD1332L | AB047VL | AB118VL | DIVLTQSPDSLAVSLGERVTMNCKSSQSLLNSGM |
| | | | | RKSFLAWYQQKPGQSPKLLIYWASTRESGVPDRF |
| | | | | TGSGSGTDFTLTISSVQAEDVAVYYCKQSYHLFT |
| | | | | FGSGTKLEIKRTVAAPDIQMTQSPSSLSASVGDR |
| | | | | VTITCRASEDIYNALAWYQQKPGKAPKLLIYNTD |
| | | | | TLHTGVPSRFSGSGSGTDYTLTISSLQPEDFATY |
| | | | | FCQHYFHYPRTFGQGTKVEIKR |

### Example 2.14

### Generation of NGF (seq. 2) and RON (seq. 2) DVD-Igs

TABLE 25

| | DVD | Outer | Inner | |
|---|---|---|---|---|
| SEQ | Variable | Variable | Variable | |
| ID | Domain | Domain | Domain | Sequence |
| NO | Name | Name | Name | 1234567890123456789012345678901234 |
| 148 | DVD1333H | AB118VH | AB034VH | EVQLVESGGGLVQPGGSLRLSCAASGFSLTNNNV |
| | | | | NWVRQAPGKGLEWVGGVWAGGATDYNSALKSRFT |
| | | | | ISRDNSKNTAYLQMNSLRAEDTAVYYCARDGGYS |
| | | | | SSTLYAMDAWGQGTLVTVSSASTKGPQVQLQESG |
| | | | | PGLVKPSEILSLTCTVSGGSISSHYWSWVRQPPG |
| | | | | KGLEWIGYIYYSGSTNYNPSLKSRVTISVDTSKN |
| | | | | QFSLNLSSVTAADTAVYYCARIPNYYDRSGYYPG |
| | | | | YWYFDLWGRGTLVTVSS |
| 149 | DVD1333L | AB118VL | AB034VL | DIQMTQSPSSLSASVGDRVTITCRASEDIYNALA |
| | | | | WYQQKPGKAPKLLIYNTDTLHTGVPSRFSGSGSG |
| | | | | TDYTLTISSLQPEDFATYFCQHYFHYPRTFGQGT |
| | | | | KVEIKRTVAAPQAVLTQPSSLSAPPGASASLTCT |
| | | | | LRSGFNVDSYRISWYQQKPGSPPQYLLRYKSDSD |
| | | | | KQQGSGVPSRFSGSKDASANAGILLISGLQSEDE |
| | | | | ADYYCMIWHSSAWVFGGGTKLTVLR |
| 150 | DVD1334H | AB034VH | AB118VH | QVQLQESGPGLVKPSEILSLTCTVSGGSISSHYW |
| | | | | SWVRQPPGKGLEWIGYIYYSGSTNYNPSLKSRVT |
| | | | | ISVDTSKNQFSLNLSSVTAADTAVYYCARIPNYY |
| | | | | DRSGYYPGYWYFDLWGRGTLVTVSSASTKGPEVQ |
| | | | | LVESGGGLVQPGGSLRLSCAASGFSLTNNNVNWV |
| | | | | RQAPGKGLEWVGGVWAGGATDYNSALKSRFTISR |
| | | | | DNSKNTAYLQMNSLRAEDTAVYYCARDGGYSSST |
| | | | | LYAMDAWGQGTLVTVSS |
| 151 | DVD1334L | AB034VL | AB118VL | QAVLTQPSSLSAPPGASASLTCTLRSGFNVDSYR |
| | | | | ISWYQQKPGSPPQYLLRYKSDSDKQQGSGVPSRF |
| | | | | SGSKDASANAGILLISGLQSEDEADYYCMIWHSS |
| | | | | AWVFGGGTKLTVLRTVAAPDIQMTQSPSSLSASV |
| | | | | GDRVTITCRASEDIYNALAWYQQKPGKAPKLLIY |
| | | | | NTDTLHTGVPSRFSGSGSGTDYTLTISSLQPEDF |
| | | | | ATYFCQHYFHYPRTFGQGTKVEIKR |

### Example 2.15

### Generation of NGF (seq. 2) and CD-20 DVD-Igs

TABLE 26

| | DVD | Outer | Inner | |
|---|---|---|---|---|
| SEQ | Variable | Variable | Variable | |
| ID | Domain | Domain | Domain | Sequence |
| NO | Name | Name | Name | 1234567890123456789012345678901234 |
| 152 | DVD1335H | AB118VH | AB001VH | EVQLVESGGGLVQPGGSLRLSCAASGFSLTNNNV |
| | | | | NWVRQAPGKGLEWVGGVWAGGATDYNSALKSRFT |
| | | | | ISRDNSKNTAYLQMNSLRAEDTAVYYCARDGGYS |
| | | | | SSTLYAMDAWGQGTLVTVSSASTKGPQVQLQQPG |
| | | | | AELVKPGASVKMSCKASGYTFTSYNMHWVKQTPG |
| | | | | RGLEWIGAIYPGNGDTSYNQKFKGKATLTADKSS |
| | | | | STAYMQLSSLTSEDSAVYYCARSTYYGGDWYFNV |
| | | | | WGAGTTVTVSA |
| 153 | DVD1335L | AB118VL | AB001VL | DIQMTQSPSSLSASVGDRVTITCRASEDIYNALA |
| | | | | WYQQKPGKAPKLLIYNTDTLHTGVPSRFSGSGSG |
| | | | | TDYTLTISSLQPEDFATYFCQHYFHYPRTFGQGT |
| | | | | KVEIKRTVAAPQIVLSQSPAILSPSPGEKVTMTC |
| | | | | RASSSVSYIHWFQQKPGSSPKPWIYATSNLASGV |
| | | | | PVRFSGSGSGTSYSLTISRVEAEDAATYYCQQWT |
| | | | | SNPPTFGGGTKLEIKR |
| 154 | DVD1336H | AB001VH | AB118VH | QVQLQQPGAELVKPGASVKMSCKASGYTFTSYNM |
| | | | | HWVKQTPGRGLEWIGAIYPGNGDTSYNQKFKGKA |
| | | | | TLTADKSSSTAYMQLSSLTSEDSAVYYCARSTYY |
| | | | | GGDWYFNVWGAGTTVTVSAASTKGPEVQLVESGG |
| | | | | GLVQPGGSLRLSCAASGFSLTNNNVNWVRQAPGK |
| | | | | GLEWVGGVWAGGATDYNSALKSRFTISRDNSKNT |
| | | | | AYLQMNSLRAEDTAVYYCARDGGYSSSTLYAMDA |
| | | | | WGQGTLVTVSS |
| 155 | DVD1336L | AB001VL | AB118VL | QIVLSQSPAILSPSPGEKVTMTCRASSSVSYIHW |
| | | | | FQQKPGSSPKPWIYATSNLASGVPVRFSGSGSGT |
| | | | | SYSLTISRVEAEDAATYYCQQWTSNPPTFGGGTK |
| | | | | LEIKRTVAAPDIQMTQSPSSLSASVGDRVTITCR |
| | | | | ASEDIYNALAWYQQKPGKAPKLLIYNTDTLHTGV |
| | | | | PSRFSGSGSGTDYTLTISSLQPEDFATYFCQHYF |
| | | | | HYPRTFGQGTKVEIKR |

### Example 2.16

### Generation of NGF (seq. 2) and EGFR (seq. 1) DVD-Igs

TABLE 27

| | DVD | Outer | Inner | |
|---|---|---|---|---|
| SEQ | Variable | Variable | Variable | |
| ID | Domain | Domain | Domain | Sequence |
| NO | Name | Name | Name | 1234567890123456789012345678901234 |
| 156 | DVD1337H | AB118VH | AB003VH | EVQLVESGGGLVQPGGSLRLSCAASGFSLTNNNV |
| | | | | NWVRQAPGKGLEWVGGVWAGGATDYNSALKSRFT |
| | | | | ISRDNSKNTAYLQMNSLRAEDTAVYYCARDGGYS |
| | | | | SSTLYAMDAWGQGTLVTVSSASTKGPQVQLQESG |
| | | | | PGLVKPSETLSLTCTVSGGSVSSGDYYWTWIRQS |
| | | | | PGKGLEWIGHIYYSGNTNYNPSLKSRLTISIDTS |
| | | | | KTQFSLKLSSVTAADTAIYYCVRDRVTGAFDIWG |
| | | | | QGTMVTVSS |
| 157 | DVD1337L | AB118VL | AB003VL | DIQMTQSPSSLSASVGDRVTITCRASEDIYNALA |
| | | | | WYQQKPGKAPKLLIYNTDTLHTGVPSRFSGSGSG |
| | | | | TDYTLTISSLQPEDFATYFCQHYFHYPRTFGQGT |
| | | | | KVEIKRTVAAPDIQMTQSPSSLSASVGDRVTITC |
| | | | | QASQDISNYLNWYQQKPGKAPKLLIYDASNLETG |
| | | | | VPSRFSGSGSGTDFTFTISSLQPEDIATYFCQHF |
| | | | | DHLPLAFGGGTKVEIKR |
| 158 | DVD1338H | AB003VH | AB118VH | QVQLQESGPGLVKPSETLSLTCTVSGGSVSSGDY |
| | | | | YWTWIRQSPGKGLEWIGHIYYSGNTNYNPSLKSR |
| | | | | LTISIDTSKTQFSLKLSSVTAADTAIYYCVRDRV |
| | | | | TGAFDIWGQGTMVTVSSASTKGPEVQLVESGGGL |
| | | | | VQPGGSLRLSCAASGFSLTNNNVNWVRQAPGKGL |
| | | | | EWVGGVWAGGATDYNSALKSRFTISRDNSKNTAY |
| | | | | LQMNSLRAEDTAVYYCARDGGYSSSTLYAMDAWG |
| | | | | QGTLVTVSS |
| 159 | DVD1338L | AB003VL | AB118VL | DIQMTQSPSSLSASVGDRVTITCQASQDISNYLN |
| | | | | WYQQKPGKAPKLLIYDASNLETGVPSRFSGSGSG |
| | | | | TDFTFTISSLQPEDIATYFCQHFDHLPLAFGGGT |
| | | | | KVEIKRTVAAPDIQMTQSPSSLSASVGDRVTITC |
| | | | | RASEDIYNALAWYQQKPGKAPKLLIYNTDTLHTG |
| | | | | VPSRFSGSGSGTDYTLTISSLQPEDFATYFCQHY |
| | | | | FHYPRTFGQGTKVEIKR |

### Example 2.17

### Generation of NGF (seq. 2) and HER-2 DVD-Igs

TABLE 28

| | DVD | Outer | Inner | |
|---|---|---|---|---|
| SEQ | Variable | Variable | Variable | |
| ID | Domain | Domain | Domain | Sequence |
| NO | Name | Name | Name | 1234567890123456789012345678901234 |
| 160 | DVD1339H | AB118VH | AB004VH | EVQLVESGGGLVQPGGSLRLSCAASGFSLTNNNV |
| | | | | NWVRQAPGKGLEWVGGVWAGGATDYNSALKSRFT |
| | | | | ISRDNSKNTAYLQMNSLRAEDTAVYYCARDGGYS |
| | | | | SSTLYAMDAWGQGTLVTVSSASTKGPEVQLVESG |
| | | | | GGLVQPGGSLRLSCAASGFNIKDTYIHWVRQAPG |
| | | | | KGLEWVARIYPTNGYTRYADSVKGRFTISADTSK |
| | | | | NTAYLQMNSLRAEDTAVYYCSRWGGDGFYAMDYW |
| | | | | GQGTLVTVSS |
| 161 | DVD1339L | AB118VL | AB004VL | DIQMTQSPSSLSASVGDRVTITCRASEDIYNALA |
| | | | | WYQQKPGKAPKLLIYNTDTLHTGVPSRFSGSGSG |
| | | | | TDYTLTISSLQPEDFATYFCQHYFHYPRTFGQGT |
| | | | | KVEIKRTVAAPDIQMTQSPSSLSASVGDRVTITC |
| | | | | RASQDVNTAVAWYQQKPGKAPKLLIYSASFLYSG |
| | | | | VPSRFSGSRSGTDFTLTISSLQPEDFATYYCQQH |
| | | | | YTTPPTFGQGTKVEIKR |
| 162 | DVD1340H | AB004VH | AB118VH | EVQLVESGGGLVQPGGSLRLSCAASGFNIKDTYI |
| | | | | HWVRQAPGKGLEWVARIYPTNGYTRYADSVKGRF |
| | | | | TISADTSKNTAYLQMNSLRAEDTAVYYCSRWGGD |
| | | | | GFYAMDYWGQGTLVTVSSASTKGPEVQLVESGGG |
| | | | | LVQPGGSLRLSCAASGFSLTNNNVNWVRQAPGKG |
| | | | | LEWVGGVWAGGATDYNSALKSRFTISRDNSKNTA |
| | | | | YLQMNSLRAEDTAVYYCARDGGYSSSTLYAMDAW |
| | | | | GQGTLVTVSS |
| 163 | DVD1340L | AB004VL | AB118VL | DIQMTQSPSSLSASVGDRVTITCRASQDVNTAVA |
| | | | | WYQQKPGKAPKLLIYSASFLYSGVPSRFSGSRSG |
| | | | | TDFTLTISSLQPEDFATYYCQQHYTTPPTFGQGT |
| | | | | KVEIKRTVAAPDIQMTQSPSSLSASVGDRVTITC |
| | | | | RASEDIYNALAWYQQKPGKAPKLLIYNTDTLHTG |
| | | | | VPSRFSGSGSGTDYTLTISSLQPEDFATYFCQHY |
| | | | | FHYPRTFGQGTKVEIKR |

### Example 2.18

### Generation of NGF (seq. 2) and CD-19 DVD-Igs

TABLE 29

| | DVD | Outer | Inner | |
|---|---|---|---|---|
| SEQ | Variable | Variable | Variable | |
| ID | Domain | Domain | Domain | Sequence |
| NO | Name | Name | Name | 1234567890123456789012345678901234 |
| 164 | DVD1341H | AB118VH | AB006VH | EVQLVESGGGLVQPGGSLRLSCAASGFSLTNNNV |
| | | | | NWVRQAPGKGLEWVGGVWAGGATDYNSALKSRFT |
| | | | | ISRDNSKNTAYLQMNSLRAEDTAVYYCARDGGYS |
| | | | | SSTLYAMDAWGQGTLVTVSSASTKGPQVQLQQSG |
| | | | | AELVRPGSSVKISCKASGYAFSSYWMNWVKQRPG |
| | | | | QGLEWIGQIWPGDGDTNYNGKFKGKATLTADESS |
| | | | | STAYMQLSSLASEDSAVYFCARRETTTVGRYYYA |
| | | | | MDYWGQGTSVTVSS |
| 165 | DVD1341L | AB118VL | AB006VL | DIQMTQSPSSLSASVGDRVTITCRASEDIYNALA |
| | | | | WYQQKPGKAPKLLIYNTDTLHTGVPSRFSGSGSG |
| | | | | TDYTLTISSLQPEDFATYFCQHYFHYPRTFGQGT |
| | | | | KVEIKRTVAAPDILLTQTPASLAVSLGQRATISC |
| | | | | KASQSVDYDGDSYLNWYQQIPGQPPKLLIYDASN |
| | | | | LVSGIPPRFSGSGSGTDFTLNIHPVEKVDAATYH |
| | | | | CQQSTEDPWTFGGGTKLEIKR |
| 166 | DVD1342H | AB006VH | AB118VH | QVQLQQSGAELVRPGSSVKISCKASGYAFSSYWM |
| | | | | NWVKQRPGQGLEWIGQIWPGDGDTNYNGKFKGKA |
| | | | | TLTADESSSTAYMQLSSLASEDSAVYFCARRETT |
| | | | | TVGRYYYAMDYWGQGTSVTVSSASTKGPEVQLVE |
| | | | | SGGGLVQPGGSLRLSCAASGFSLTNNNVNWVRQA |
| | | | | PGKGLEWVGGVWAGGATDYNSALKSRFTISRDNS |
| | | | | KNTAYLQMNSLRAEDTAVYYCARDGGYSSSTLYA |
| | | | | MDAWGQGTLVTVSS |
| 167 | DVD1342L | AB006VL | AB118VL | DILLTQTPASLAVSLGQRATISCKASQSVDYDGD |
| | | | | SYLNWYQQIPGQPPKLLIYDASNLVSGIPPRFSG |
| | | | | SGSGTDFTLNIHPVEKVDAATYHCQQSTEDPWTF |
| | | | | GGGTKLEIKRTVAAPDIQMTQSPSSLSASVGDRV |
| | | | | TITCRASEDIYNALAWYQQKPGKAPKLLIYNTDT |
| | | | | LHTGVPSRFSGSGSGTDYTLTISSLQPEDFATYF |
| | | | | CQHYFHYPRTFGQGTKVEIKR |

### Example 2.19

### Generation of NGF (seq. 2) and CD-80 DVD-Igs

TABLE 30

| | DVD | Outer | Inner | |
|---|---|---|---|---|
| SEQ | Variable | Variable | Variable | |
| ID | Domain | Domain | Domain | Sequence |
| NO | Name | Name | Name | 1234567890123456789012345678901234 |
| 168 | DVD1343H | AB118VH | AB007VH | EVQLVESGGGLVQPGGSLRLSCAASGFSLTNNNV |
| | | | | NWVRQAPGKGLEWVGGVWAGGATDYNSALKSRFT |
| | | | | ISRDNSKNTAYLQMNSLRAEDTAVYYCARDGGYS |
| | | | | SSTLYAMDAWGQGTLVTVSSASTKGPQVQLQESG |
| | | | | PGLVKPSETLSLTCAVSGGSISGGYGWGWIRQPP |
| | | | | GKGLEWIGSFYSSSGNTYYNPSLKSQVTISTDTS |
| | | | | KNQFSLKLNSMTAADTAVYYCVRDRLFSVVGMVY |
| | | | | NNWFDVWGPGVLVTVSS |
| 169 | DVD1343L | AB118VL | AB007VL | DIQMTQSPSSLSASVGDRVTITCRASEDIYNALA |
| | | | | WYQQKPGKAPKLLIYNTDTLHTGVPSRFSGSGSG |
| | | | | TDYTLTISSLQPEDFATYFCQHYFHYPRTFGQGT |
| | | | | KVEIKRTVAAPESALTQPPSVSGAPGQKVTISCT |
| | | | | GSTSNIGGYDLHWYQQLPGTAPKLLIYDINKRPS |
| | | | | GISDRFSGSKSGTAASLAITGLQTEDEADYYCQS |
| | | | | YDSSLNAQVFGGGTRLTVLG |
| 170 | DVD1344H | AB007VH | AB118VH | QVQLQESGPGLVKPSETLSLTCAVSGGSISGGYG |
| | | | | WGWIRQPPGKGLEWIGSFYSSSGNTYYNPSLKSQ |
| | | | | VTISTDTSKNQFSLKLNSMTAADTAVYYCVRDRL |
| | | | | FSVVGMVYNNWFDVWGPGVLVTVSSASTKGPEVQ |
| | | | | LVESGGGLVQPGGSLRLSCAASGFSLTNNNVNWV |
| | | | | RQAPGKGLEWVGGVWAGGATDYNSALKSRFTISR |
| | | | | DNSKNTAYLQMNSLRAEDTAVYYCARDGGYSSST |
| | | | | LYAMDAWGQGTLVTVSS |
| 171 | DVD1344L | AB007VL | AB118VL | ESALTQPPSVSGAPGQKVTISCTGSTSNIGGYDL |
| | | | | HWYQQLPGTAPKLLIYDINKRPSGISDRFSGSKS |
| | | | | GTAASLAITGLQTEDEADYYCQSYDSSLNAQVFG |
| | | | | GGTRLTVLGQPKAAPDIQMTQSPSSLSASVGDRV |
| | | | | TITCRASEDIYNALAWYQQKPGKAPKLLIYNTDT |
| | | | | LHTGVPSRFSGSGSGTDYTLTISSLQPEDFATYF |
| | | | | CQHYFHYPRTFGQGTKVEIKR |

### Example 2.20

### Generation of NGF (seq. 2) and CD-22 DVD-Igs

TABLE 31

| | DVD | Outer | Inner | |
|---|---|---|---|---|
| SEQ | Variable | Variable | Variable | |
| ID | Domain | Domain | Domain | Sequence |
| NO | Name | Name | Name | 1234567890123456789012345678901234 |
| 172 | DVD1345H | AB118VH | AB008VH | EVQLVESGGGLVQPGGSLRLSCAASGFSLTNNNV |
| | | | | NWVRQAPGKGLEWVGGVWAGGATDYNSALKSRFT |
| | | | | ISRDNSKNTAYLQMNSLRAEDTAVYYCARDGGYS |
| | | | | SSTLYAMDAWGQGTLVTVSSASTKGPQVQLVQSG |
| | | | | AEVKKPGSSVKVSCKASGYTFTSYWLHWVRQAPG |
| | | | | QGLEWIGYINPRNDYTEYNQNFKDKATITADEST |
| | | | | NTAYMELSSLRSEDTAFYFCARRDITTFYWGQGT |
| | | | | TVTVSS |
| 173 | DVD1345L | AB118VL | AB008VL | DIQMTQSPSSLSASVGDRVTITCRASEDIYNALA |
| | | | | WYQQKPGKAPKLLIYNTDTLHTGVPSRFSGSGSG |
| | | | | TDYTLTISSLQPEDFATYFCQHYFHYPRTFGQGT |
| | | | | KVEIKRTVAAPDIQLTQSPSSLSASVGDRVTMSC |
| | | | | KSSQSVLYSANHKNYLAWYQQKPGKAPKLLIYWA |
| | | | | STRESGVPSRFSGSGSGTDFTFTISSLQPEDIAT |
| | | | | YYCHQYLSSWTFGGGTKLEIKR |
| 174 | DVD1346H | AB008VH | AB118VH | QVQLVQSGAEVKKPGSSVKVSCKASGYTFTSYWL |
| | | | | HWVRQAPGQGLEWIGYINPRNDYTEYNQNFKDKA |
| | | | | TITADESTNTAYMELSSLRSEDTAFYFCARRDIT |
| | | | | TFYWGQGTTVTVSSASTKGPEVQLVESGGGLVQP |
| | | | | GGSLRLSCAASGFSLTNNNVNWVRQAPGKGLEWV |
| | | | | GGVWAGGATDYNSALKSRFTISRDNSKNTAYLQM |
| | | | | NSLRAEDTAVYYCARDGGYSSSTLYAMDAWGQGT |
| | | | | LVTVSS |
| 175 | DVD1346L | AB008VL | AB118VL | DIQLTQSPSSLSASVGDRVTMSCKSSQSVLYSAN |
| | | | | HKNYLAWYQQKPGKAPKLLIYWASTRESGVPSRF |
| | | | | SGSGSGTDFTFTISSLQPEDIATYYCHQYLSSWT |
| | | | | FGGGTKLEIKRTVAAPDIQMTQSPSSLSASVGDR |
| | | | | VTITCRASEDIYNALAWYQQKPGKAPKLLIYNTD |
| | | | | TLHTGVPSRFSGSGSGTDYTLTISSLQPEDFATY |
| | | | | FCQHYFHYPRTFGQGTKVEIKR |

### Example 2.21

### Generation of NGF (seq. 2) and CD-40 DVD-Igs

TABLE 32

| | DVD | Outer | Inner | |
|---|---|---|---|---|
| SEQ | Variable | Variable | Variable | |
| ID | Domain | Domain | Domain | Sequence |
| NO | Name | Name | Name | 1234567890123456789012345678901234 |
| 176 | DVD1347H | AB118VH | AB009VH | EVQLVESGGGLVQPGGSLRLSCAASGFSLTNNNV |
| | | | | NWVRQAPGKGLEWVGGVWAGGATDYNSALKSRFT |
| | | | | ISRDNSKNTAYLQMNSLRAEDTAVYYCARDGGYS |
| | | | | SSTLYAMDAWGQGTLVTVSSASTKGPQVQLVESG |
| | | | | GGVVQPGRSLRLSCAASGFTFSSYGMHWVRQAPG |
| | | | | KGLEWVAVISYEESNRYHADSVKGRFTISRDNSK |
| | | | | ITLYLQMNSLRTEDTAVYYCARDGGIAAPGPDYW |
| | | | | GQGTLVTVSS |
| 177 | DVD1347L | AB118VL | AB009VL | DIQMTQSPSSLSASVGDRVTITCRASEDIYNALA |
| | | | | WYQQKPGKAPKLLIYNTDTLHTGVPSRFSGSGSG |
| | | | | TDYTLTISSLQPEDFATYFCQHYFHYPRTFGQGT |
| | | | | KVEIKRTVAAPDIVMTQSPLSLTVTPGEPASISC |
| | | | | RSSQSLLYSNGYNYLDWYLQKPGQSPQVLISLGS |
| | | | | NRASGVPDRFSGSGSGTDFTLKISRVEAEDVGVY |
| | | | | YCMQARQTPFTFGPGTKVDIRR |
| 178 | DVD1348H | AB009VH | AB118VH | QVQLVESGGGVVQPGRSLRLSCAASGFTFSSYGM |
| | | | | HWVRQAPGKGLEWVAVISYEESNRYHADSVKGRF |
| | | | | TISRDNSKITLYLQMNSLRTEDTAVYYCARDGGI |
| | | | | AAPGPDYWGQGTLVTVSSASTKGPEVQLVESGGG |
| | | | | LVQPGGSLRLSCAASGFSLTNNNVNWVRQAPGKG |
| | | | | LEWVGGVWAGGATDYNSALKSRFTISRDNSKNTA |
| | | | | YLQMNSLRAEDTAVYYCARDGGYSSSTLYAMDAW |
| | | | | GQGTLVTVSS |
| 179 | DVD1348L | AB009VL | AB118VL | DIVMTQSPLSLTVTPGEPASISCRSSQSLLYSNG |
| | | | | YNYLDWYLQKPGQSPQVLISLGSNRASGVPDRFS |
| | | | | GSGSGTDFTLKISRVEAEDVGVYYCMQARQTPFT |
| | | | | FGPGTKVDIRRTVAAPDIQMTQSPSSLSASVGDR |
| | | | | VTITCRASEDIYNALAWYQQKPGKAPKLLIYNTD |
| | | | | TLHTGVPSRFSGSGSGTDYTLTISSLQPEDFATY |
| | | | | FCQHYFHYPRTFGQGTKVEIKR |

### Example 2.22

### Generation of NGF (seq. 2) and c-MET DVD-Igs

TABLE 33

| | DVD | Outer | Inner | |
|---|---|---|---|---|
| SEQ | Variable | Variable | Variable | |
| ID | Domain | Domain | Domain | Sequence |
| NO | Name | Name | Name | 1234567890123456789012345678901234 |
| 180 | DVD1349H | AB118VH | AB013VH | EVQLVESGGGLVQPGGSLRLSCAASGFSLTNNNV |
| | | | | NWVRQAPGKGLEWVGGVWAGGATDYNSALKSRFT |
| | | | | ISRDNSKNTAYLQMNSLRAEDTAVYYCARDGGYS |
| | | | | SSTLYAMDAWGQGTLVTVSSASTKGPQVQLQQSG |
| | | | | PELVRPGASVKWSCPASGYTFTSYWLHWVKKQRP |
| | | | | GQGLEWIGMIDPSNSDTRfNPPNFKDKATLNVDR |
| | | | | SSNTAYNLLSSLTSADSAVYYCATYGSYVSPLDY |
| | | | | WGQGTSVYVSS |
| 181 | DVD1349L | AB118VL | AB013VL | DIQMTQSPSSLSASVGDRVTITCRASEDIYNALA |
| | | | | WYQQKPGKAPKLLIYNTDTLHTGVPSRFSGSGSG |
| | | | | TDYTLTISSLQPEDFATYFCQHYFHYPRTFGQGT |
| | | | | KVEIKRTVAAPDIMMSQSPSSLTVSVGEKVTVSC |
| | | | | KSSQSLLVTSSQKNYLAWYQQKPQQSPKLLIYWA |
| | | | | STRESGVPDRFTGSGSGTDFTLTITSVKADDLAV |
| | | | | YYCQQYYAYPWTFGDGTKLEIKR |
| 182 | DVD1350H | AB013VH | AB118VH | QVQLQQSGPELVRPGASVKWSCPASGYTFTSYWL |
| | | | | HWVKKQRPGQGLEWIGMIDPSNSDTRfNPPNFKD |
| | | | | KATLNVDRSSNTAYNLLSSLTSADSAVYYCATYG |
| | | | | SYVSPLDYWGQGTSVYVSSASTKGPEVQLVESGG |
| | | | | GLVQPGGSLRLSCAASGFSLTNNNVNWVRQAPGK |
| | | | | GLEWVGGVWAGGATDYNSALKSRFTISRDNSKNT |
| | | | | AYLQMNSLRAEDTAVYYCARDGGYSSSTLYAMDA |
| | | | | WGQGTLVTVSS |
| 183 | DVD1350L | AB013VL | AB118VL | DIMMSQSPSSLTVSVGEKVTVSCKSSQSLLVTSS |
| | | | | QKNYLAWYQQKPQQSPKLLIYWASTRESGVPDRF |
| | | | | TGSGSGTDFTLTITSVKADDLAVYYCQQYYAYPW |
| | | | | TFGDGTKLEIKRTVAAPDIQMTQSPSSLSASVGD |
| | | | | RVTITCRASEDIYNALAWYQQKPGKAPKLLIYNT |
| | | | | DTLHTGVPSRFSGSGSGTDYTLTISSLQPEDFAT |
| | | | | YFCQHYFHYPRTFGQGTKVEIKR |

### Example 2.23

### Generation of NGF (seq. 2) and NRP1 (seq. 1) DVD-Igs

TABLE 34

| | DVD | Outer | Inner | |
|---|---|---|---|---|
| SEQ | Variable | Variable | Variable | |
| ID | Domain | Domain | Domain | Sequence |
| NO | Name | Name | Name | 1234567890123456789012345678901234 |
| 184 | DVD1351H | AB118VH | AB016VH | EVQLVESGGGLVQPGGSLRLSCAASGFSLTNNNV |
| | | | | NWVRQAPGKGLEWVGGVWAGGATDYNSALKSRFT |
| | | | | ISRDNSKNTAYLQMNSLRAEDTAVYYCARDGGYS |
| | | | | SSTLYAMDAWGQGTLVTVSSASTKGPEVQLVESG |
| | | | | GGLVQPGGSLRLSCAASGFSFSSEPISWVRQAPG |
| | | | | KGLEWVSSITGKNGYTYYADSVKGRFTISADTSK |
| | | | | NTAYLQMNSLRAEDTAVYYCARWGKKVYGMDVWG |
| | | | | QGTLVTVSS |
| 185 | DVD1351L | AB118VL | AB016VL | DIQMTQSPSSLSASVGDRVTITCRASEDIYNALA |
| | | | | WYQQKPGKAPKLLIYNTDTLHTGVPSRFSGSGSG |
| | | | | TDYTLTISSLQPEDFATYFCQHYFHYPRTFGQGT |
| | | | | KVEIKRTVAAPDIQMTQSPSSLSASVGDRVTITC |
| | | | | RASQSISSYLAWYQQKPGKAPKLLIYGASSRASG |
| | | | | VPSRFSGSGSGTDFTLTISSLQPEDFATYYCQQY |
| | | | | MSVPITFGQGTKVEIKR |
| 186 | DVD1352H | AB016VH | AB118VH | EVQLVESGGGLVQPGGSLRLSCAASGFSFSSEPI |
| | | | | SWVRQAPGKGLEWVSSITGKNGYTYYADSVKGRF |
| | | | | TISADTSKNTAYLQMNSLRAEDTAVYYCARWGKK |
| | | | | VYGMDVWGQGTLVTVSSASTKGPEVQLVESGGGL |
| | | | | VQPGGSLRLSCAASGFSLTNNNVNWVRQAPGKGL |
| | | | | EWVGGVWAGGATDYNSALKSRFTISRDNSKNTAY |
| | | | | LQMNSLRAEDTAVYYCARDGGYSSSTLYAMDAWG |
| | | | | QGTLVTVSS |
| 187 | DVD1352L | AB016VL | AB118VL | DIQMTQSPSSLSASVGDRVTITCRASQSISSYLA |
| | | | | WYQQKPGKAPKLLIYGASSRASGVPSRFSGSGSG |
| | | | | TDFTLTISSLQPEDFATYYCQQYMSVPITFGQGT |
| | | | | KVEIKRTVAAPDIQMTQSPSSLSASVGDRVTITC |
| | | | | RASEDIYNALAWYQQKPGKAPKLLIYNTDTLHTG |
| | | | | VPSRFSGSGSGTDYTLTISSLQPEDFATYFCQHY |
| | | | | FHYPRTFGQGTKVEIKR |

### Example 2.24

### Generation of NGF (seq. 2) and NRP1 (seq. 2) DVD-Igs

TABLE 35

| | DVD | Outer | Inner | |
|---|---|---|---|---|
| SEQ | Variable | Variable | Variable | |
| ID | Domain | Domain | Domain | Sequence |
| NO | Name | Name | Name | 1234567890123456789012345678901234 |
| 188 | DVD1353H | AB118VH | AB035VH | EVQLVESGGGLVQPGGSLRLSCAASGFSLTNNNV |
| | | | | NWVRQAPGKGLEWVGGVWAGGATDYNSALKSRFT |
| | | | | ISRDNSKNTAYLQMNSLRAEDTAVYYCARDGGYS |
| | | | | SSTLYAMDAWGQGTLVTVSSASTKGPEVQLVESG |
| | | | | GGLVQPGGSLRLSCAASGFTFSSYAMSWVRQAPG |
| | | | | KGLEWVSQISPAGGYTNYADSVKGRFTISADTSK |
| | | | | NTAYLQMNSLRAEDTAVYYCARELPYYRMSKVMD |
| | | | | VQGQGTLVTVSS |
| 189 | DVD1353L | AB118VL | AB035VL | DIQMTQSPSSLSASVGDRVTITCRASEDIYNALA |
| | | | | WYQQKPGKAPKLLIYNTDTLHTGVPSRFSGSGSG |
| | | | | TDYTLTISSLQPEDFATYFCQHYFHYPRTFGQGT |
| | | | | KVEIKRTVAAPDIQMTQSPSSLSASVGDRVTITC |
| | | | | RASQYFSSYLAWYQQKPGKAPKLLIYGASSRASG |
| | | | | VPSRFSGSGSGTDFTLTISSLQPEDFATYYCQQY |
| | | | | LGSPPTFGQGTKVEIKR |
| 190 | DVD1354H | AB035VH | AB118VH | EVQLVESGGGLVQPGGSLRLSCAASGFTFSSYAM |
| | | | | SWVRQAPGKGLEWVSQISPAGGYTNYADSVKGRF |
| | | | | TISADTSKNTAYLQMNSLRAEDTAVYYCARELPY |
| | | | | YRMSKVMDVQGQGTLVTVSSASTKGPEVQLVESG |
| | | | | GGLVQPGGSLRLSCAASGFSLTNNNVNWVRQAPG |
| | | | | KGLEWVGGVWAGGATDYNSALKSRFTISRDNSKN |
| | | | | TAYLQMNSLRAEDTAVYYCARDGGYSSSTLYAMD |
| | | | | AWGQGTLVTVSS |
| 191 | DVD1354L | AB035VL | AB118VL | DIQMTQSPSSLSASVGDRVTITCRASQYFSSYLA |
| | | | | WYQQKPGKAPKLLIYGASSRASGVPSRFSGSGSG |
| | | | | TDFTLTISSLQPEDFATYYCQQYLGSPPTFGQGT |
| | | | | KVEIKRTVAAPDIQMTQSPSSLSASVGDRVTITC |
| | | | | RASEDIYNALAWYQQKPGKAPKLLIYNTDTLHTG |
| | | | | VPSRFSGSGSGTDYTLTISSLQPEDFATYFCQHY |
| | | | | FHYPRTFGQGTKVEIKR |

### Example 2.25

### Generation of NGF (seq. 2) and CD-3 (seq. 2) DVD-Igs

TABLE 36

| | DVD | Outer | Inner | |
|---|---|---|---|---|
| SEQ | Variable | Variable | Variable | |
| ID | Domain | Domain | Domain | Sequence |
| NO | Name | Name | Name | 1234567890123456789012345678901234 |
| 192 | DVD1357H | AB118VH | AB039VH | EVQLVESGGGLVQPGGSLRLSCAASGFSLTNNNV |
| | | | | NWVRQAPGKGLEWVGGVWAGGATDYNSALKSRFT |
| | | | | ISRDNSKNTAYLQMNSLRAEDTAVYYCARDGGYS |
| | | | | SSTLYAMDAWGQGTLVTVSSASTKGPQVQLQQSG |
| | | | | AELARPGASVKMSCKASGYTFTRYTMHWVKQRPG |
| | | | | QGLEWIGYINPSRGYTNYNQKFKDKATLTTDKSS |
| | | | | STAYMQLSSLTSEDSAVYYCARYYDDHYCLDYWG |
| | | | | QGTTLTVSS |
| 193 | DVD1357L | AB118VL | AB039VL | DIQMTQSPSSLSASVGDRVTITCRASEDIYNALA |
| | | | | WYQQKPGKAPKLLIYNTDTLHTGVPSRFSGSGSG |
| | | | | TDYTLTISSLQPEDFATYFCQHYFHYPRTFGQGT |
| | | | | KVEIKRTVAAPQIVLTQSPAIMSASPGEKVTMTC |
| | | | | SASSSVSYMNWYQQKSGTSPKRWIYDTSKLASGV |
| | | | | PAHFRGSGSGTSYSLTISGMEAEDAATYYCQQWS |
| | | | | SNPFTFGSGTKLEINR |
| 194 | DVD1358H | AB039VH | AB118VH | QVQLQQSGAELARPGASVKMSCKASGYTFTRYTM |
| | | | | HWVKQRPGQGLEWIGYINPSRGYTNYNQKFKDKA |
| | | | | TLTTDKSSSTAYMQLSSLTSEDSAVYYCARYYDD |
| | | | | HYCLDYWGQGTTLTVSSASTKGPEVQLVESGGGL |
| | | | | VQPGGSLRLSCAASGFSLTNNNVNWVRQAPGKGL |
| | | | | EWVGGVWAGGATDYNSALKSRFTISRDNSKNTAY |
| | | | | LQMNSLRAEDTAVYYCARDGGYSSSTLYAMDAWG |
| | | | | QGTLVTVSS |
| 195 | DVD1358L | AB039VL | AB118VL | QIVLTQSPAIMSASPGEKVTMTCSASSSVSYMNW |
| | | | | YQQKSGTSPKRWIYDTSKLASGVPAHFRGSGSGT |
| | | | | SYSLTISGMEAEDAATYYCQQWSSNPFTFGSGTK |
| | | | | LEINRTVAAPDIQMTQSPSSLSASVGDRVTITCR |
| | | | | ASEDIYNALAWYQQKPGKAPKLLIYNTDTLHTGV |
| | | | | PSRFSGSGSGTDYTLTISSLQPEDFATYFCQHYF |
| | | | | HYPRTFGQGTKVEIKR |

### Example 2.26

### Generation of NGF (seq. 2) and ErbB3 (seq. 3) DVD-Igs

TABLE 37

| | DVD | Outer | Inner | |
|---|---|---|---|---|
| SEQ | Variable | Variable | Variable | |
| ID | Domain | Domain | Domain | Sequence |
| NO | Name | Name | Name | 1234567890123456789012345678901234 |
| 196 | DVD1361H | AB118VH | AB116VH | EVQLVESGGGLVQPGGSLRLSCAASGFSLTNNNV |
| | | | | NWVRQAPGKGLEWVGGVWAGGATDYNSALKSRFT |
| | | | | ISRDNSKNTAYLQMNSLRAEDTAVYYCARDGGYS |
| | | | | SSTLYAMDAWGQGTLVTVSSASTKGPEVQLLESG |
| | | | | GGLVQPGGSLRLSCAASGFTFSHYVMAWVRQAPG |
| | | | | KGLEWVSSISSSGGWTLYADSVKGRFTISRDNSK |
| | | | | NTLYLQMNSLRAEDTAVYYCTRGLKMATIFDYWG |
| | | | | QGTLVTVSS |
| 197 | DVD1361L | AB118VL | AB116VL | DIQMTQSPSSLSASVGDRVTITCRASEDIYNALA |
| | | | | WYQQKPGKAPKLLIYNTDTLHTGVPSRFSGSGSG |
| | | | | TDYTLTISSLQPEDFATYFCQHYFHYPRTFGQGT |
| | | | | KVEIKRTVAAPQSALTQPASVSGSPGQSITISCT |
| | | | | GTSSDVGSYNVVSWYQQHPGKAPKLIIYEVSQRP |
| | | | | SGVSNRFSGSKSGNTASLTISGLQTEDEADYYCC |
| | | | | SYAGSSIFVIFGGGTKVTVLG |
| 198 | DVD1362H | AB116VH | AB118VH | EVQLLESGGGLVQPGGSLRLSCAASGFTFSHYVM |
| | | | | AWVRQAPGKGLEWVSSISSSGGWTLYADSVKGRF |
| | | | | TISRDNSKNTLYLQMNSLRAEDTAVYYCTRGLKM |
| | | | | ATIFDYWGQGTLVTVSSASTKGPEVQLVESGGGL |
| | | | | VQPGGSLRLSCAASGFSLTNNNVNWVRQAPGKGL |
| | | | | EWVGGVWAGGATDYNSALKSRFTISRDNSKNTAY |
| | | | | LQMNSLRAEDTAVYYCARDGGYSSSTLYAMDAWG |
| | | | | QGTLVTVSS |
| 199 | DVD1362L | AB116VL | AB118VL | QSALTQPASVSGSPGQSITISCTGTSSDVGSYNV |
| | | | | VSWYQQHPGKAPKLIIYEVSQRPSGVSNRFSGSK |
| | | | | SGNTASLTISGLQTEDEADYYCCSYAGSSIFVIF |
| | | | | GGGTKVTVLGQPKAAPDIQMTQSPSSLSASVGDR |
| | | | | VTITCRASEDIYNALAWYQQKPGKAPKLLIYNTD |
| | | | | TLHTGVPSRFSGSGSGTDYTLTISSLQPEDFATY |
| | | | | FCQHYFHYPRTFGQGTKVEIKR |

### Example 2.27

### Generation of NGF (seq. 2) and VEGF (seq. 2) DVD-Igs

TABLE 38

| | DVD | Outer | Inner | |
|---|---|---|---|---|
| SEQ | Variable | Variable | Variable | |
| ID | Domain | Domain | Domain | Sequence |
| NO | Name | Name | Name | 1234567890123456789012345678901234 |
| 200 | DVD1363H | AB118VH | AB070VH | EVQLVESGGGLVQPGGSLRLSCAASGFSLTNNNV |
| | | | | NWVRQAPGKGLEWVGGVWAGGATDYNSALKSRFT |
| | | | | ISRDNSKNTAYLQMNSLRAEDTAVYYCARDGGYS |
| | | | | SSTLYAMDAWGQGTLVTVSSASTKGPEVQLVESG |
| | | | | GGLVQPGGSLRLSCAASGFTISDYWIHWVRQAPG |
| | | | | KGLEWVAGITPAGGYTYYADSVKGRFTISADTSK |
| | | | | NTAYLQMNSLRAEDTAVYYCARFVFFLPYAMDYW |
| | | | | GQGTLVTVSS |
| 201 | DVD1363L | AB118VL | AB070VL | DIQMTQSPSSLSASVGDRVTITCRASEDIYNALA |
| | | | | WYQQKPGKAPKLLIYNTDTLHTGVPSRFSGSGSG |
| | | | | TDYTLTISSLQPEDFATYFCQHYFHYPRTFGQGT |
| | | | | KVEIKRTVAAPDIQMTQSPSSLSASVGDRVTITC |
| | | | | RASQDVSTAVAWYQQKPGKAPKLLIYSASFLYSG |
| | | | | VPSRFSGSGSGTDFTLTISSLQPEDFATYYCQQS |
| | | | | YTTPPTFGQGTKVEIKR |
| 202 | DVD1364H | AB070VH | AB118VH | EVQLVESGGGLVQPGGSLRLSCAASGFTISDYWI |
| | | | | HWVRQAPGKGLEWVAGITPAGGYTYYADSVKGRF |
| | | | | TISADTSKNTAYLQMNSLRAEDTAVYYCARFVFF |
| | | | | LPYAMDYWGQGTLVTVSSASTKGPEVQLVESGGG |
| | | | | LVQPGGSLRLSCAASGFSLTNNNVNWVRQAPGKG |
| | | | | LEWVGGVWAGGATDYNSALKSRFTISRDNSKNTA |
| | | | | YLQMNSLRAEDTAVYYCARDGGYSSSTLYAMDAW |
| | | | | GQGTLVTVSS |
| 203 | DVD1364L | AB070VL | AB118VL | DIQMTQSPSSLSASVGDRVTITCRASQDVSTAVA |
| | | | | WYQQKPGKAPKLLIYSASFLYSGVPSRFSGSGSG |
| | | | | TDFTLTISSLQPEDFATYYCQQSYTTPPTFGQGT |
| | | | | KVEIKRTVAAPDIQMTQSPSSLSASVGDRVTITC |
| | | | | RASEDIYNALAWYQQKPGKAPKLLIYNTDTLHTG |
| | | | | VPSRFSGSGSGTDYTLTISSLQPEDFATYFCQHY |
| | | | | FHYPRTFGQGTKVEIKR |

### Example 2.28

### Generation of NGF (seq. 2) and VEGF (seq. 4) DVD-Igs

TABLE 39

| | DVD | Outer | Inner | |
|---|---|---|---|---|
| SEQ | Variable | Variable | Variable | |
| ID | Domain | Domain | Domain | Sequence |
| NO | Name | Name | Name | 1234567890123456789012345678901234 |
| 204 | DVD1365H | AB118VH | AB117VH | EVQLVESGGGLVQPGGSLRLSCAASGFSLTNNNV |
| | | | | NWVRQAPGKGLEWVGGVWAGGATDYNSALKSRFT |
| | | | | ISRDNSKNTAYLQMNSLRAEDTAVYYCARDGGYS |
| | | | | SSTLYAMDAWGQGTLVTVSSASTKGPEVQLVESG |
| | | | | GGLVQPGGSLRLSCAASGFTINASWIHWVRQAPG |
| | | | | KGLEWVGAIYPYSGYTNYADSVKGRFTISADTSK |
| | | | | NTAYLQMNSLRAEDTAVYYCARWGHSTSPWAMDY |
| | | | | WGQGTLVTVSS |
| 205 | DVD1365L | AB118VL | AB117VL | DIQMTQSPSSLSASVGDRVTITCRASEDIYNALA |
| | | | | WYQQKPGKAPKLLIYNTDTLHTGVPSRFSGSGSG |
| | | | | TDYTLTISSLQPEDFATYFCQHYFHYPRTFGQGT |
| | | | | KVEIKRTVAAPDIQMTQSPSSLSASVGDRVTITC |
| | | | | RASQVIRRSLAWYQQKPGKAPKLLIYAASNLASG |
| | | | | VPSRFSGSGSGTDFTLTISSLQPEDFATYYCQQS |
| | | | | NTSPLTFGQGTKVEIKR |
| 206 | DVD1366H | AB117VH | AB118VH | EVQLVESGGGLVQPGGSLRLSCAASGFTINASWI |
| | | | | HWVRQAPGKGLEWVGAIYPYSGYTNYADSVKGRF |
| | | | | TISADTSKNTAYLQMNSLRAEDTAVYYCARWGHS |
| | | | | TSPWAMDYWGQGTLVTVSSASTKGPEVQLVESGG |
| | | | | GLVQPGGSLRLSCAASGFSLTNNNVNWVRQAPGK |
| | | | | GLEWVGGVWAGGATDYNSALKSRFTISRDNSKNT |
| | | | | AYLQMNSLRAEDTAVYYCARDGGYSSSTLYAMDA |
| | | | | WGQGTLVTVSS |
| 207 | DVD1366L | AB117VL | AB118VL | DIQMTQSPSSLSASVGDRVTITCRASQVIRRSLA |
| | | | | WYQQKPGKAPKLLIYAASNLASGVPSRFSGSGSG |
| | | | | TDFTLTISSLQPEDFATYYCQQSNTSPLTFGQGT |
| | | | | KVEIKRTVAAPDIQMTQSPSSLSASVGDRVTITC |
| | | | | RASEDIYNALAWYQQKPGKAPKLLIYNTDTLHTG |
| | | | | VPSRFSGSGSGTDYTLTISSLQPEDFATYFCQHY |
| | | | | FHYPRTFGQGTKVEIKR |

### Example 2.29

### Generation of NGF (seq. 2) and VEGF (seq. 3) DVD-Igs

TABLE 40

| | DVD | Outer | Inner | |
|---|---|---|---|---|
| SEQ | Variable | Variable | Variable | |
| ID | Domain | Domain | Domain | Sequence |
| NO | Name | Name | Name | 1234567890123456789012345678901234 |
| 208 | DVD1367H | AB118VH | AB103VH | EVQLVESGGGLVQPGGSLRLSCAASGFSLTNNNV |
| | | | | NWVRQAPGKGLEWVGGVWAGGATDYNSALKSRFT |
| | | | | ISRDNSKNTAYLQMNSLRAEDTAVYYCARDGGYS |
| | | | | SSTLYAMDAWGQGTLVTVSSASTKGPEVQLVESG |
| | | | | GGLVQPGGSLRLSCAASGYDFTHYGMNWVRQAPG |
| | | | | KGLEWVGWINTYTGEPTYAADFKRRFTFSLDTSK |
| | | | | STAYLQMNSLRAEDTAVYYCAKYPYYYGTSHWYF |
| | | | | DVWGQGTLVTVSS |
| 209 | DVD1367L | AB118VL | AB103VL | DIQMTQSPSSLSASVGDRVTITCRASEDIYNALA |
| | | | | WYQQKPGKAPKLLIYNTDTLHTGVPSRFSGSGSG |
| | | | | TDYTLTISSLQPEDFATYFCQHYFHYPRTFGQGT |
| | | | | KVEIKRTVAAPDIQLTQSPSSLSASVGDRVTITC |
| | | | | SASQDISNYLNWYQQKPGKAPKVLIYFTSSLHSG |
| | | | | VPSRFSGSGSGTDFTLTISSLQPEDFATYYCQQY |
| | | | | STVPWTFGQGTKVEIKR |
| 210 | DVD1368H | AB103VH | AB118VH | EVQLVESGGGLVQPGGSLRLSCAASGYDFTHYGM |
| | | | | NWVRQAPGKGLEWVGWINTYTGEPTYAADFKRRF |
| | | | | TFSLDTSKSTAYLQMNSLRAEDTAVYYCAKYPYY |
| | | | | YGTSHWYFDVWGQGTLVTVSSASTKGPEVQLVES |
| | | | | GGGLVQPGGSLRLSCAASGFSLTNNNVNWVRQAP |
| | | | | GKGLEWVGGVWAGGATDYNSALKSRFTISRDNSK |
| | | | | NTAYLQMNSLRAEDTAVYYCARDGGYSSSTLYAM |
| | | | | DAWGQGTLVTVSS |
| 211 | DVD1368L | AB103VL | AB118VL | DIQLTQSPSSLSASVGDRVTITCSASQDISNYLN |
| | | | | WYQQKPGKAPKVLIYFTSSLHSGVPSRFSGSGSG |
| | | | | TDFTLTISSLQPEDFATYYCQQYSTVPWTFGQGT |
| | | | | KVEIKRTVAAPDIQMTQSPSSLSASVGDRVTITC |
| | | | | RASEDIYNALAWYQQKPGKAPKLLIYNTDTLHTG |
| | | | | VPSRFSGSGSGTDYTLTISSLQPEDFATYFCQHY |
| | | | | FHYPRTFGQGTKVEIKR |

### Example 2.30

### Generation of NGF (seq. 2) and EGFR (seq. 3) DVD-Igs

TABLE 41

| | DVD | Outer | Inner | |
|---|---|---|---|---|
| SEQ | Variable | Variable | Variable | |
| ID | Domain | Domain | Domain | Sequence |
| NO | Name | Name | Name | 1234567890123456789012345678901234 |
| 212 | DVD1369H | AB118VH | AB064VH | EVQLVESGGGLVQPGGSLRLSCAASGFSLTNNNV |
| | | | | NWVRQAPGKGLEWVGGVWAGGATDYNSALKSRFT |
| | | | | ISRDNSKNTAYLQMNSLRAEDTAVYYCARDGGYS |
| | | | | SSTLYAMDAWGQGTLVTVSSASTKGPQVQLQESG |
| | | | | PGLVKPSQTLSLTCTVSGYSISSDFAWNWIRQPP |
| | | | | GKGLEWMGYISYSGNTRYQPSLKSRITISRDTSK |
| | | | | NQFFLKLNSVTAADTATYYCVTAGRGFPYWGQGT |
| | | | | LVTVSS |
| 213 | DVD1369L | AB118VL | AB064VL | DIQMTQSPSSLSASVGDRVTITCRASEDIYNALA |
| | | | | WYQQKPGKAPKLLIYNTDTLHTGVPSRFSGSGSG |
| | | | | TDYTLTISSLQPEDFATYFCQHYFHYPRTFGQGT |
| | | | | KVEIKRTVAAPDIQMTQSPSSMSVSVGDRVTITC |
| | | | | HSSQDINSNIGWLQQKPGKSFKGLIYHGTNLDDG |
| | | | | VPSRFSGSGSGTDYTLTISSLQPEDFATYYCVQY |
| | | | | AQFPWTFGGGTKLEIKR |
| 214 | DVD1370H | AB064VH | AB118VH | QVQLQESGPGLVKPSQTLSLTCTVSGYSISSDFA |
| | | | | WNWIRQPPGKGLEWMGYISYSGNTRYQPSLKSRI |
| | | | | TISRDTSKNQFFLKLNSVTAADTATYYCVTAGRG |
| | | | | FPYWGQGTLVTVSSASTKGPEVQLVESGGGLVQP |
| | | | | GGSLRLSCAASGFSLTNNNVNWVRQAPGKGLEWV |
| | | | | GGVWAGGATDYNSALKSRFTISRDNSKNTAYLQM |
| | | | | NSLRAEDTAVYYCARDGGYSSSTLYAMDAWGQGT |
| | | | | LVTVSS |
| 215 | DVD1370L | AB064VL | AB118VL | DIQMTQSPSSMSVSVGDRVTITCHSSQDINSNIG |
| | | | | WLQQKPGKSFKGLIYHGTNLDDGVPSRFSGSGSG |
| | | | | TDYTLTISSLQPEDFATYYCVQYAQFPWTFGGGT |
| | | | | KLEIKRTVAAPDIQMTQSPSSLSASVGDRVTITC |
| | | | | RASEDIYNALAWYQQKPGKAPKLLIYNTDTLHTG |
| | | | | VPSRFSGSGSGTDYTLTISSLQPEDFATYFCQHY |
| | | | | FHYPRTFGQGTKVEIKR |

### Example 2.31

### Generation of NGF (seq. 1) and MTX DVD-Igs

TABLE 42

| | DVD | Outer | Inner | |
|---|---|---|---|---|
| SEQ | Variable | Variable | Variable | |
| ID | Domain | Domain | Domain | Sequence |
| NO | Name | Name | Name | 1234567890123456789012345678901234 |
| 216 | DVD1371H | AB020VH | AB119VH | QVQLQESGPGLVKPSETLSLTCTVSGFSLIGYDL |
| | | | | NWIRQPPGKGLEWIGIIWGDGTTDYNSAVKSRVT |
| | | | | ISKDTSKNQFSLKLSSVTAADTAVYYCARGGYWY |
| | | | | ATSYYFDYWGQGTLVTVSSASTKGPDVQLQESGP |
| | | | | GLVKPSQSLSLTCTVTGFSITSPYAWNWIRQFPG |
| | | | | NTLEWMGYISYRGSTTHHPSLKSRISITRDTSKN |
| | | | | QFFLQLNSVTTEDTATYFCSSYGNYGAYSGQGTL |
| | | | | VTVSA |
| 217 | DVD1371L | AB020VL | AB119VL | DIQMTQSPSSLSASVGDRVTITCRASQSISNNLN |
| | | | | WYQQKPGKAPKLLIYYTSRFHSGVPSRFSGSGSG |
| | | | | TDFTFTISSLQPEDIATYYCQQEHTLPYTFGQGT |
| | | | | KLEIKRTVAAPDVLLTQIPLSLPVSLGDQASISC |
| | | | | RSSQSIVHSNGNTYLEWYLQKPGQSPKLLIYKVS |
| | | | | TRFSGVPDRFSGSGSGTDFTLKISRVEAEDLGVY |
| | | | | YCFQGSHVPLTFGAGTQLELKR |
| 218 | DVD1372H | AB119VH | AB020VH | DVQLQESGPGLVKPSQSLSLTCTVTGFSITSPYA |
| | | | | WNWIRQFPGNTLEWMGYISYRGSTTHHPSLKSRI |
| | | | | SITRDTSKNQFFLQLNSVTTEDTATYFCSSYGNY |
| | | | | GAYSGQGTLVTVSAASTKGPQVQLQESGPGLVKP |
| | | | | SETLSLTCTVSGFSLIGYDLNWIRQPPGKGLEWI |
| | | | | GIIWGDGTTDYNSAVKSRVTISKDTSKNQFSLKL |
| | | | | SSVTAADTAVYYCARGGYWYATSYYFDYWGQGTL |
| | | | | VTVSS |
| 219 | DVD1372L | AB119VL | AB020VL | DVLLTQIPLSLPVSLGDQASISCRSSQSIVHSNG |
| | | | | NTYLEWYLQKPGQSPKLLIYKVSTRFSGVPDRFS |
| | | | | GSGSGTDFTLKISRVEAEDLGVYYCFQGSHVPLT |
| | | | | FGAGTQLELKRTVAAPDIQMTQSPSSLSASVGDR |
| | | | | VTITCRASQSISNNLNWYQQKPGKAPKLLIYYTS |
| | | | | RFHSGVPSRFSGSGSGTDFTFTISSLQPEDIATY |
| | | | | YCQQEHTLPYTFGQGTKLEIKR |

### Example 2.32

### Generation of NGF (seq. 1) and NKG2D DVD-Igs

TABLE 43

| | DVD | Outer | Inner | |
|---|---|---|---|---|
| SEQ | Variable | Variable | Variable | |
| ID | Domain | Domain | Domain | Sequence |
| NO | Name | Name | Name | 1234567890123456789012345678901234 |
| 220 | DVD1373H | AB020VH | AB121VH | QVQLQESGPGLVKPSETLSLTCTVSGFSLIGYDL |
| | | | | NWIRQPPGKGLEWIGIIWGDGTTDYNSAVKSRVT |
| | | | | ISKDTSKNQFSLKLSSVTAADTAVYYCARGGYWY |
| | | | | ATSYYFDYWGQGTLVTVSSASTKGPQVQLVESGG |
| | | | | GLVKPGGSLRLSCAASGFTFSSYGMHWVRQAPGK |
| | | | | GLEWVAFIRYDGSNKYYADSVKGRFTISRDNSKN |
| | | | | TLYLQMNSLRAEDTAVYYCAKDRGLGDGTYFDYW |
| | | | | GQGTTVTVSS |
| 221 | DVD1373L | AB020VL | AB121VL | DIQMTQSPSSLSASVGDRVTITCRASQSISNNLN |
| | | | | WYQQKPGKAPKLLIYYTSRFHSGVPSRFSGSGSG |
| | | | | TDFTFTISSLQPEDIATYYCQQEHTLPYTFGQGT |
| | | | | KLEIKRTVAAPQSALTQPASVSGSPGQSITISCS |
| | | | | GSSSNIGNNAVNWYQQLPGKAPKLLIYYDDLLPS |
| | | | | GVSDRFSGSKSGTSAFLAISGLQSEDEADYYCAA |
| | | | | WDDSLNGPVFGGGTKLTVLG |
| 222 | DVD1374H | AB121VH | AB020VH | QVQLVESGGGLVKPGGSLRLSCAASGFTFSSYGM |
| | | | | HWVRQAPGKGLEWVAFIRYDGSNKYYADSVKGRF |
| | | | | TISRDNSKNTLYLQMNSLRAEDTAVYYCAKDRGL |
| | | | | GDGTYFDYWGQGTTVTVSSASTKGPQVQLQESGP |
| | | | | GLVKPSETLSLTCTVSGFSLIGYDLNWIRQPPGK |
| | | | | GLEWIGIIWGDGTTDYNSAVKSRVTISKDTSKNQ |
| | | | | FSLKLSSVTAADTAVYYCARGGYWYATSYYFDYW |
| | | | | GQGTLVTVSS |
| 223 | DVD1374L | AB121VL | AB020VL | QSALTQPASVSGSPGQSITISCSGSSSNIGNNAV |
| | | | | NWYQQLPGKAPKLLIYYDDLLPSGVSDRFSGSKS |
| | | | | GTSAFLAISGLQSEDEADYYCAAWDDSLNGPVFG |
| | | | | GGTKLTVLGQPKAAPDIQMTQSPSSLSASVGDRV |
| | | | | TITCRASQSISNNLNWYQQKPGKAPKLLIYYTSR |
| | | | | FHSGVPSRFSGSGSGTDFTFTISSLQPEDIATYY |
| | | | | CQQEHTLPYTFGQGTKLEIKR |

### Example 2.33

### Generation of NGF (seq. 1) and EGFR (seq. 2) DVD-Igs

TABLE 44

| | DVD | Outer | Inner | |
|---|---|---|---|---|
| SEQ | Variable | Variable | Variable | |
| ID | Domain | Domain | Domain | Sequence |
| NO | Name | Name | Name | 1234567890123456789012345678901234 |
| 224 | DVD1375H | AB020VH | AB033VH | QVQLQESGPGLVKPSETLSLTCTVSGFSLIGYDL |
| | | | | NWIRQPPGKGLEWIGIIWGDGTTDYNSAVKSRVT |
| | | | | ISKDTSKNQFSLKLSSVTAADTAVYYCARGGYWY |
| | | | | ATSYYFDYWGQGTLVTVSSASTKGPQVQLKQSGP |
| | | | | GLVQPSQSLSITCTVSGFSLTNYGVHWVRQSPGK |
| | | | | GLEWLGVIWSGGNTDYNTPFTSRLSINKDNSKSQ |
| | | | | VFFKMNSLQSNDTAIYYCARALTYYDYEFAYWGQ |
| | | | | GTLVTVSA |
| 225 | DVD1375L | AB020VL | AB033VL | DIQMTQSPSSLSASVGDRVTITCRASQSISNNLN |
| | | | | WYQQKPGKAPKLLIYYTSRFHSGVPSRFSGSGSG |
| | | | | TDFTFTISSLQPEDIATYYCQQEHTLPYTFGQGT |
| | | | | KLEIKRTVAAPDILLTQSPVILSVSPGERVSFSC |
| | | | | RASQSIGTNIHWYQQRTNGSPRLLIKYASESISG |
| | | | | IPSRFSGSGSGTDFTLSINSVESEDIADYYCQQN |
| | | | | NNWPTTFGAGTKLELKR |
| 226 | DVD1376H | AB033VH | AB020VH | QVQLKQSGPGLVQPSQSLSITCTVSGFSLTNYGV |
| | | | | HWVRQSPGKGLEWLGVIWSGGNTDYNTPFTSRLS |
| | | | | INKDNSKSQVFFKMNSLQSNDTAIYYCARALTYY |
| | | | | DYEFAYWGQGTLVTVSAASTKGPQVQLQESGPGL |
| | | | | VKPSETLSLTCTVSGFSLIGYDLNWIRQPPGKGL |
| | | | | EWIGIIWGDGTTDYNSAVKSRVTISKDTSKNQFS |
| | | | | LKLSSVTAADTAVYYCARGGYWYATSYYFDYWGQ |
| | | | | GTLVTVSS |
| 227 | DVD1376L | AB033VL | AB020VL | DILLTQSPVILSVSPGERVSFSCRASQSIGTNIH |
| | | | | WYQQRTNGSPRLLIKYASESISGIPSRFSGSGSG |
| | | | | TDFTLSINSVESEDIADYYCQQNNNWPTTFGAGT |
| | | | | KLELKRTVAAPDIQMTQSPSSLSASVGDRVTITC |
| | | | | RASQSISNNLNWYQQKPGKAPKLLIYYTSRFHSG |
| | | | | VPSRFSGSGSGTDFTFTISSLQPEDIATYYCQQE |
| | | | | HTLPYTFGQGTKLEIKR |

### Example 2.34

### Generation of NGF (seq. 1) and IGF1,2 DVD-Igs

TABLE 45

| | DVD | Outer | Inner | |
|---|---|---|---|---|
| SEQ | Variable | Variable | Variable | |
| ID | Domain | Domain | Domain | Sequence |
| NO | Name | Name | Name | 1234567890123456789012345678901234 |
| 228 | DVD1377H | AB020VH | AB010VH | QVQLQESGPGLVKPSETLSLTCTVSGFSLIGYDL |
| | | | | NWIRQPPGKGLEWIGIIWGDGTTDYNSAVKSRVT |
| | | | | ISKDTSKNQFSLKLSSVTAADTAVYYCARGGYWY |
| | | | | ATSYYFDYWGQGTLVTVSSASTKGPQVQLVQSGA |
| | | | | EVKKPGASVKVSCKASGYTFTSYDINWVRQATGQ |
| | | | | GLEWMGWMNPNSGNTGYAQKFQGRVTMTRNTSIS |
| | | | | TAYMELSSLRSEDTAVYYCARDPYYYYYGMDVWG |
| | | | | QGTTVTVSS |
| 229 | DVD1377L | AB020VL | AB010VL | DIQMTQSPSSLSASVGDRVTITCRASQSISNNLN |
| | | | | WYQQKPGKAPKLLIYYTSRFHSGVPSRFSGSGSG |
| | | | | TDFTFTISSLQPEDIATYYCQQEHTLPYTFGQGT |
| | | | | KLEIKRTVAAPQSVLTQPPSVSAAPGQKVTISCS |
| | | | | GSSSNIENNHVSWYQQLPGTAPKLLIYDNNKRPS |
| | | | | GIPDRFSGSKSGTSATLGITGLQTGDEADYYCET |
| | | | | WDTSLSAGRVFGGGTKLTVLG |
| 230 | DVD1378H | AB010VH | AB020VH | QVQLVQSGAEVKKPGASVKVSCKASGYTFTSYDI |
| | | | | NWVRQATGQGLEWMGWMNPNSGNTGYAQKFQGRV |
| | | | | TMTRNTSISTAYMELSSLRSEDTAVYYCARDPYY |
| | | | | YYYGMDVWGQGTTVTVSSASTKGPQVQLQESGPG |
| | | | | LVKPSETLSLTCTVSGFSLIGYDLNWIRQPPGKG |
| | | | | LEWIGIIWGDGTTDYNSAVKSRVTISKDTSKNQF |
| | | | | SLKLSSVTAADTAVYYCARGGYWYATSYYFDYWG |
| | | | | QGTLVTVSS |
| 231 | DVD1378L | AB010VL | AB020VL | QSVLTQPPSVSAAPGQKVTISCSGSSSNIENNHV |
| | | | | SWYQQLPGTAPKLLIYDNNKRPSGIPDRFSGSKS |
| | | | | GTSATLGITGLQTGDEADYYCETWDTSLSAGRVF |
| | | | | GGGTKLTVLGQPKAAPDIQMTQSPSSLSASVGDR |
| | | | | VTITCRASQSISNNLNWYQQKPGKAPKLLIYYTS |
| | | | | RFHSGVPSRFSGSGSGTDFTFTISSLQPEDIATY |
| | | | | YCQQEHTLPYTFGQGTKLEIKR |

### Example 2.35

### Generation of NGF (seq. 1) and RON (seq. 1) DVD-Igs with Short-Long Linkers

TABLE 46

| | DVD | Outer | Inner | |
|---|---|---|---|---|
| SEQ | Variable | Variable | Variable | |
| ID | Domain | Domain | Domain | Sequence |
| NO | Name | Name | Name | 1234567890123456789012345678901234 |
| 232 | DVD1379H | AB020VH | AB005VH | QVQLQESGPGLVKPSETLSLTCTVSGFSLIGYDL |
| | | | | NWIRQPPGKGLEWIGIIWGDGTTDYNSAVKSRVT |
| | | | | ISKDTSKNQFSLKLSSVTAADTAVYYCARGGYWY |
| | | | | ATSYYFDYWGQGTLVTVSSASTKGPEVQLVQSGG |
| | | | | GLVKPGGSLRLSCAASGFTFSSYAMHWVRQAPGK |
| | | | | GLEWVAVISYDGSNKYYADSVKGRFTISRDNSKN |
| | | | | TLYLQMNSLRAEDTAVYYCARFSGWPNNYYYYGM |
| | | | | DVWGQGTTVTVSS |
| 233 | DVD1379L | AB020VL | AB005VL | DIQMTQSPSSLSASVGDRVTITCRASQSISNNLN |
| | | | | WYQQKPGKAPKLLIYYTSRFHSGVPSRFSGSGSG |
| | | | | TDFTFTISSLQPEDIATYYCQQEHTLPYTFGQGT |
| | | | | KLEIKRTVAAPDVVMTQSPLSLPVTPGEPASISC |
| | | | | RSSQSLLHSNGFNYVDWYLQKPGQSPHLLIYFGS |
| | | | | YRASGVPDRFSGSGSGTDFTLKISRVEAEDVGVY |
| | | | | YCMQALQTPPWTFGQGTKVEIRR |
| 234 | DVD1380H | AB005VH | AB020VH | EVQLVQSGGGLVKPGGSLRLSCAASGFTFSSYAM |
| | | | | HWVRQAPGKGLEWVAVISYDGSNKYYADSVKGRF |
| | | | | TISRDNSKNTLYLQMNSLRAEDTAVYYCARFSGW |
| | | | | PNNYYYYGMDVWGQGTTVTVSSASTKGPQVQLQE |
| | | | | SGPGLVKPSETLSLTCTVSGFSLIGYDLNWIRQP |
| | | | | PGKGLEWIGIIWGDGTTDYNSAVKSRVTISKDTS |
| | | | | KNQFSLKLSSVTAADTAVYYCARGGYWYATSYYF |
| | | | | DYWGQGTLVTVSS |
| 235 | DVD1380L | AB005VL | AB020VL | DVVMTQSPLSLPVTPGEPASISCRSSQSLLHSNG |
| | | | | FNYVDWYLQKPGQSPHLLIYFGSYRASGVPDRFS |
| | | | | GSGSGTDFTLKISRVEAEDVGVYYCMQALQTPPW |
| | | | | TFGQGTKVEIRRTVAAPDIQMTQSPSSLSASVGD |
| | | | | RVTITCRASQSISNNLNWYQQKPGKAPKLLIYYT |
| | | | | SRFHSGVPSRFSGSGSGTDFTFTISSLQPEDIAT |
| | | | | YYCQQEHTLPYTFGQGTKLEIKR |

### Example 2.36

### Generation of NGF (seq. 1) and ErbB3 (seq. 1) DVD-Igs

TABLE 47

| | DVD | Outer | Inner | |
|---|---|---|---|---|
| SEQ | Variable | Variable | Variable | |
| ID | Domain | Domain | Domain | Sequence |
| NO | Name | Name | Name | 1234567890123456789012345678901234 |
| 236 | DVD1381H | AB020VH | AB062VH | QVQLQESGPGLVKPSETLSLTCTVSGFSLIGYDL |
| | | | | NWIRQPPGKGLEWIGIIWGDGTTDYNSAVKSRVT |
| | | | | ISKDTSKNQFSLKLSSVTAADTAVYYCARGGYWY |
| | | | | ATSYYFDYWGQGTLVTVSSASTKGPQVQLQQWGA |
| | | | | GLLKPSETLSLTCAVYGGSFSGYYWSWIRQPPGK |
| | | | | GLEWIGEINHSGSTNYNPSLKSRVTISVETSKNQ |
| | | | | FSLKLSSVTAADTAVYYCARDKWTWYFDLWGRGT |
| | | | | LVTVSS |
| 237 | DVD1381L | AB020VL | AB062VL | DIQMTQSPSSLSASVGDRVTITCRASQSISNNLN |
| | | | | WYQQKPGKAPKLLIYYTSRFHSGVPSRFSGSGSG |
| | | | | TDFTFTISSLQPEDIATYYCQQEHTLPYTFGQGT |
| | | | | KLEIKRTVAAPDIEMTQSPDSLAVSLGERATINC |
| | | | | RSSQSVLYSSSNRNYLAWYQQNPGQPPKLLIYWA |
| | | | | STRESGVPDRFSGSGSGTDFTLTISSLQAEDVAV |
| | | | | YYCQQYYSTPRTFGQGTKVEIKR |
| 238 | DVD1382H | AB062VH | AB020VH | QVQLQQWGAGLLKPSETLSLTCAVYGGSFSGYYW |
| | | | | SWIRQPPGKGLEWIGEINHSGSTNYNPSLKSRVT |
| | | | | ISVETSKNQFSLKLSSVTAADTAVYYCARDKWTW |
| | | | | YFDLWGRGTLVTVSSASTKGPQVQLQESGPGLVK |
| | | | | PSETLSLTCTVSGFSLIGYDLNWIRQPPGKGLEW |
| | | | | IGIIWGDGTTDYNSAVKSRVTISKDTSKNQFSLK |
| | | | | LSSVTAADTAVYYCARGGYWYATSYYFDYWGQGT |
| | | | | LVTVSS |
| 239 | DVD1382L | AB062VL | AB020VL | DIEMTQSPDSLAVSLGERATINCRSSQSVLYSSS |
| | | | | NRNYLAWYQQNPGQPPKLLIYWASTRESGVPDRF |
| | | | | SGSGSGTDFTLTISSLQAEDVAVYYCQQYYSTPR |
| | | | | TFGQGTKVEIKRTVAAPDIQMTQSPSSLSASVGD |
| | | | | RVTITCRASQSISNNLNWYQQKPGKAPKLLIYYT |
| | | | | SRFHSGVPSRFSGSGSGTDFTFTISSLQPEDIAT |
| | | | | YYCQQEHTLPYTFGQGTKLEIKR |

### Example 2.37

### Generation of NGF (seq. 1) and ErbB3 (seq. 2) DVD-Igs

TABLE 48

| | DVD | Outer | Inner | |
|---|---|---|---|---|
| SEQ | Variable | Variable | Variable | |
| ID | Domain | Domain | Domain | Sequence |
| NO | Name | Name | Name | 1234567890123456789012345678901234 |
| 240 | DVD1383H | AB020VH | AB063VH | QVQLQESGPGLVKPSETLSLTCTVSGFSLIGYDL |
| | | | | NWIRQPPGKGLEWIGIIWGDGTTDYNSAVKSRVT |
| | | | | ISKDTSKNQFSLKLSSVTAADTAVYYCARGGYWY |
| | | | | ATSYYFDYWGQGTLVTVSSASTKGPEVQLVESGG |
| | | | | GLVQPGGSLRLSCAASGFTFSIYSMNWVRQAPGK |
| | | | | GLEWVSYISSSSSTIYYADSVKGRFTISRDNAKN |
| | | | | SLYLQMNSLRDEDTAVYYCARDRGDFDAFDIWGQ |
| | | | | GTMVTVSS |
| 241 | DVD1383L | AB020VL | AB063VL | DIQMTQSPSSLSASVGDRVTITCRASQSISNNLN |
| | | | | WYQQKPGKAPKLLIYYTSRFHSGVPSRFSGSGSG |
| | | | | TDFTFTISSLQPEDIATYYCQQEHTLPYTFGQGT |
| | | | | KLEIKRTVAAPDIQMTQSPSSLSASVGDRVTITC |
| | | | | QASQDITNYLNWYQQKPGKAPKLLIYDASNLETG |
| | | | | VPSRFSGSGSGTDFTFTISSLQPEDIATYNCQQC |
| | | | | ENFPITFGQGTRLEIKR |
| 242 | DVD1384H | AB063VH | AB020VH | EVQLVESGGGLVQPGGSLRLSCAASGFTFSIYSM |
| | | | | NWVRQAPGKGLEWVSYISSSSSTIYYADSVKGRF |
| | | | | TISRDNAKNSLYLQMNSLRDEDTAVYYCARDRGD |
| | | | | FDAFDIWGQGTMVTVSSASTKGPQVQLQESGPGL |
| | | | | VKPSETLSLTCTVSGFSLIGYDLNWIRQPPGKGL |
| | | | | EWIGIIWGDGTTDYNSAVKSRVTISKDTSKNQFS |
| | | | | LKLSSVTAADTAVYYCARGGYWYATSYYFDYWGQ |
| | | | | GTLVTVSS |
| 243 | DVD1384L | AB063VL | AB020VL | DIQMTQSPSSLSASVGDRVTITCQASQDITNYLN |
| | | | | WYQQKPGKAPKLLIYDASNLETGVPSRFSGSGSG |
| | | | | TDFTFTISSLQPEDIATYNCQQCENFPITFGQGT |
| | | | | RLEIKRTVAAPDIQMTQSPSSLSASVGDRVTITC |
| | | | | RASQSISNNLNWYQQKPGKAPKLLIYYTSRFHSG |
| | | | | VPSRFSGSGSGTDFTFTISSLQPEDIATYYCQQE |
| | | | | HTLPYTFGQGTKLEIKR |

### Example 2.38

### Generation of NGF (seq. 1) and CD-3 (seq. 1) DVD-Igs

TABLE 49

| | DVD | Outer | Inner | |
|---|---|---|---|---|
| SEQ | Variable | Variable | Variable | |
| ID | Domain | Domain | Domain | Sequence |
| NO | Name | Name | Name | 1234567890123456789012345678901234 |
| 244 | DVD1385H | AB020VH | AB002VH | QVQLQESGPGLVKPSETLSLTCTVSGFSLIGYDL |
| | | | | NWIRQPPGKGLEWIGIIWGDGTTDYNSAVKSRVT |
| | | | | ISKDTSKNQFSLKLSSVTAADTAVYYCARGGYWY |
| | | | | ATSYYFDYWGQGTLVTVSSASTKGPQVQLQQSGA |
| | | | | ELARPGASVKMSCKASGYTFTRYTMHWVKQRPGQ |
| | | | | GLEWIGYINPSRGYTNYNQKFKDKATLTTDKSSS |
| | | | | TAYMQLSSLTSEDSAVYYCARYYDDHYCLDYWGQ |
| | | | | GTTLTVSS |
| 245 | DVD1385L | AB020VL | AB002VL | DIQMTQSPSSLSASVGDRVTITCRASQSISNNLN |
| | | | | WYQQKPGKAPKLLIYYTSRFHSGVPSRFSGSGSG |
| | | | | TDFTFTISSLQPEDIATYYCQQEHTLPYTFGQGT |
| | | | | KLEIKRTVAAPQIVLTQSPAIMSASPGEKVTMTC |
| | | | | RASSSVSYMNWYQQKSGTSPKRWIYDTSKVASGV |
| | | | | PYRFSGSGSGTSYSLTISSMEAEDAATYYCQQWS |
| | | | | SNPLTFGSGTKLEINR |
| 246 | DVD1386H | AB002VH | AB020VH | QVQLQQSGAELARPGASVKMSCKASGYTFTRYTM |
| | | | | HWVKQRPGQGLEWIGYINPSRGYTNYNQKFKDKA |
| | | | | TLTTDKSSSTAYMQLSSLTSEDSAVYYCARYYDD |
| | | | | HYCLDYWGQGTTLTVSSASTKGPQVQLQESGPGL |
| | | | | VKPSETLSLTCTVSGFSLIGYDLNWIRQPPGKGL |
| | | | | EWIGIIWGDGTTDYNSAVKSRVTISKDTSKNQFS |
| | | | | LKLSSVTAADTAVYYCARGGYWYATSYYFDYWGQ |
| | | | | GTLVTVSS |
| 247 | DVD1386L | AB002VL | AB020VL | QIVLTQSPAIMSASPGEKVTMTCRASSSVSYMNW |
| | | | | YQQKSGTSPKRWIYDTSKVASGVPYRFSGSGSGT |
| | | | | SYSLTISSMEAEDAATYYCQQWSSNPLTFGSGTK |
| | | | | LEINRTVAAPDIQMTQSPSSLSASVGDRVTITCR |
| | | | | ASQSISNNLNWYQQKPGKAPKLLIYYTSRFHSGV |
| | | | | PSRFSGSGSGTDFTFTISSLQPEDIATYYCQQEH |
| | | | | TLPYTFGQGTKLEIKR |

### Example 2.39

### Generation of NGF (seq. 1) and IGF1R DVD-Igs

TABLE 50

| | DVD | Outer | Inner | |
|---|---|---|---|---|
| SEQ | Variable | Variable | Variable | |
| ID | Domain | Domain | Domain | Sequence |
| NO | Name | Name | Name | 1234567890123456789012345678901234 |
| 248 | DVD1387H | AB020VH | AB011VH | QVQLQESGPGLVKPSETLSLTCTVSGFSLIGYDL |
| | | | | NWIRQPPGKGLEWIGIIWGDGTTDYNSAVKSRVT |
| | | | | ISKDTSKNQFSLKLSSVTAADTAVYYCARGGYWY |
| | | | | ATSYYFDYWGQGTLVTVSSASTKGPEVQLLESGG |
| | | | | GLVQPGGSLRLSCTASGFTFSSYAMNWVRQAPGK |
| | | | | GLEWVSAISGSGGTTFYADSVKGRFTISRDNSRT |
| | | | | TLYLQMNSLRAEDTAVYYCAKDLGWSDSYYYYYG |
| | | | | MDVWGQGTTVTVSS |
| 249 | DVD1387L | AB020VL | AB011VL | DIQMTQSPSSLSASVGDRVTITCRASQSISNNLN |
| | | | | WYQQKPGKAPKLLIYYTSRFHSGVPSRFSGSGSG |
| | | | | TDFTFTISSLQPEDIATYYCQQEHTLPYTFGQGT |
| | | | | KLEIKRTVAAPDIQMTQFPSSLSASVGDRVTITC |
| | | | | RASQGIRNDLGWYQQKPGKAPKRLIYAASRLHRG |
| | | | | VPSRFSGSGSGTEFTLTISSLQPEDFATYYCLQH |
| | | | | NSYPCSFGQGTKLEIKR |
| 250 | DVD1388H | AB011VH | AB020VH | EVQLLESGGGLVQPGGSLRLSCTASGFTFSSYAM |
| | | | | NWVRQAPGKGLEWVSAISGSGGTTFYADSVKGRF |
| | | | | TISRDNSRTTLYLQMNSLRAEDTAVYYCAKDLGW |
| | | | | SDSYYYYYGMDVWGQGTTVTVSSASTKGPQVQLQ |
| | | | | ESGPGLVKPSETLSLTCTVSGFSLIGYDLNWIRQ |
| | | | | PPGKGLEWIGIIWGDGTTDYNSAVKSRVTISKDT |
| | | | | SKNQFSLKLSSVTAADTAVYYCARGGYWYATSYY |
| | | | | FDYWGQGTLVTVSS |
| 251 | DVD1388L | AB011VL | AB020VL | DIQMTQFPSSLSASVGDRVTITCRASQGIRNDLG |
| | | | | WYQQKPGKAPKRLIYAASRLHRGVPSRFSGSGSG |
| | | | | TEFTLTISSLQPEDFATYYCLQHNSYPCSFGQGT |
| | | | | KLEIKRTVAAPDIQMTQSPSSLSASVGDRVTITC |
| | | | | RASQSISNNLNWYQQKPGKAPKLLIYYTSRFHSG |
| | | | | VPSRFSGSGSGTDFTFTISSLQPEDIATYYCQQE |
| | | | | HTLPYTFGQGTKLEIKR |

### Example 2.40

### Generation of NGF (seq. 1) and HGF DVD-Igs

TABLE 51

| | DVD | Outer | Inner | |
|---|---|---|---|---|
| SEQ | Variable | Variable | Variable | |
| ID | Domain | Domain | Domain | Sequence |
| NO | Name | Name | Name | 1234567890123456789012345678901234 |
| 252 | DVD1389H | AB020VH | AB012VH | QVQLQESGPGLVKPSETLSLTCTVSGFSLIGYDL |
| | | | | NWIRQPPGKGLEWIGIIWGDGTTDYNSAVKSRVT |
| | | | | ISKDTSKNQFSLKLSSVTAADTAVYYCARGGYWY |
| | | | | ATSYYFDYWGQGTLVTVSSASTKGPQVQLVESGG |
| | | | | GLVKPGGSLRLSCAASGFTFSDYYMSWIRQAPGK |
| | | | | GLEWVSYISSSGSTIYYADSVKGRFTISRDNAKN |
| | | | | SLYLQMNSLRAEDTAVYYCARDEYNSGWYVLFDY |
| | | | | WGQGTLVTVSS |
| 253 | DVD1389L | AB020VL | AB012VL | DIQMTQSPSSLSASVGDRVTITCRASQSISNNLN |
| | | | | WYQQKPGKAPKLLIYYTSRFHSGVPSRFSGSGSG |
| | | | | TDFTFTISSLQPEDIATYYCQQEHTLPYTFGQGT |
| | | | | KLEIKRTVAAPDIQMTQSPSSVSASVGDRVTITC |
| | | | | RASQGISSWLAWYQQKPGKAPNLLIYEASSLQSG |
| | | | | VPSRFGGSGSGTDFTLTISSLQPEDFATYYCQQA |
| | | | | NGFPWTFGQGTKVEIKR |
| 254 | DVD1390H | AB012VH | AB020VH | QVQLVESGGGLVKPGGSLRLSCAASGFTFSDYYM |
| | | | | SWIRQAPGKGLEWVSYISSSGSTIYYADSVKGRF |
| | | | | TISRDNAKNSLYLQMNSLRAEDTAVYYCARDEYN |
| | | | | SGWYVLFDYWGQGTLVTVSSASTKGPQVQLQESG |
| | | | | PGLVKPSETLSLTCTVSGFSLIGYDLNWIRQPPG |
| | | | | KGLEWIGIIWGDGTTDYNSAVKSRVTISKDTSKN |
| | | | | QFSLKLSSVTAADTAVYYCARGGYWYATSYYFDY |
| | | | | WGQGTLVTVSS |
| 255 | DVD1390L | AB012VL | AB020VL | DIQMTQSPSSVSASVGDRVTITCRASQGISSWLA |
| | | | | WYQQKPGKAPNLLIYEASSLQSGVPSRFGGSGSG |
| | | | | TDFTLTISSLQPEDFATYYCQQANGFPWTFGQGT |
| | | | | KVEIKRTVAAPDIQMTQSPSSLSASVGDRVTITC |
| | | | | RASQSISNNLNWYQQKPGKAPKLLIYYTSRFHSG |
| | | | | VPSRFSGSGSGTDFTFTISSLQPEDIATYYCQQE |
| | | | | HTLPYTFGQGTKLEIKR |

### Example 2.41

### Generation of NGF (sea. 1) and VEGF (sea. 1) DVD-12s

TABLE 52

| | DVD | Outer | Inner | |
|---|---|---|---|---|
| SEQ | Variable | Variable | Variable | |
| ID | Domain | Domain | Domain | Sequence |
| NO | Name | Name | Name | 1234567890123456789012345678901234 |
| 256 | DVD1391H | AB020VH | AB014VH | QVQLQESGPGLVKPSETLSLTCTVSGFSLIGYDL |
| | | | | NWIRQPPGKGLEWIGIIWGDGTTDYNSAVKSRVT |
| | | | | ISKDTSKNQFSLKLSSVTAADTAVYYCARGGYWY |
| | | | | ATSYYFDYWGQGTLVTVSSASTKGPEVQLVESGG |
| | | | | GLVQPGGSLRLSCAASGYTFTNYGMNWVRQAPGK |
| | | | | GLEWVGWINTYTGEPTYAADFKRRFTFSLDTSKS |
| | | | | TAYLQMNSLRAEDTAVYYCAKYPHYYGSSHWYFD |
| | | | | VWGQGTLVTVSS |
| 257 | DVD1391L | AB020VL | AB014VL | DIQMTQSPSSLSASVGDRVTITCRASQSISNNLN |
| | | | | WYQQKPGKAPKLLIYYTSRFHSGVPSRFSGSGSG |
| | | | | TDFTFTISSLQPEDIATYYCQQEHTLPYTFGQGT |
| | | | | KLEIKRTVAAPDIQMTQSPSSLSASVGDRVTITC |
| | | | | SASQDISNYLNWYQQKPGKAPKVLIYFTSSLHSG |
| | | | | VPSRFSGSGSGTDFTLTISSLQPEDFATYYCQQY |
| | | | | STVPWTFGQGTKVEIKR |
| 258 | DVD1392H | AB014VH | AB020VH | EVQLVESGGGLVQPGGSLRLSCAASGYTFTNYGM |
| | | | | NWVRQAPGKGLEWVGWINTYTGEPTYAADFKRRF |
| | | | | TFSLDTSKSTAYLQMNSLRAEDTAVYYCAKYPHY |
| | | | | YGSSHWYFDVWGQGTLVTVSSASTKGPQVQLQES |
| | | | | GPGLVKPSETLSLTCTVSGFSLIGYDLNWIRQPP |
| | | | | GKGLEWIGIIWGDGTTDYNSAVKSRVTISKDTSK |
| | | | | NQFSLKLSSVTAADTAVYYCARGGYWYATSYYFD |
| | | | | YWGQGTLVTVSS |
| 259 | DVD1392L | AB014VL | AB020VL | DIQMTQSPSSLSASVGDRVTITCSASQDISNYLN |
| | | | | WYQQKPGKAPKVLIYFTSSLHSGVPSRFSGSGSG |
| | | | | TDFTLTISSLQPEDFATYYCQQYSTVPWTFGQGT |
| | | | | KVEIKRTVAAPDIQMTQSPSSLSASVGDRVTITC |
| | | | | RASQSISNNLNWYQQKPGKAPKLLIYYTSRFHSG |
| | | | | VPSRFSGSGSGTDFTFTISSLQPEDIATYYCQQE |
| | | | | HTLPYTFGQGTKLEIKR |

### Example 2.42

### Generation of NGF (seq. 1) and DLL4 DVD-Igs

TABLE 53

| | DVD | Outer | Inner | |
|---|---|---|---|---|
| SEQ | Variable | Variable | Variable | |
| ID | Domain | Domain | Domain | Sequence |
| NO | Name | Name | Name | 1234567890123456789012345678901234 |
| 260 | DVD1393H | AB020VH | AB015VH | QVQLQESGPGLVKPSETLSLTCTVSGFSLIGYDL |
| | | | | NWIRQPPGKGLEWIGIIWGDGTTDYNSAVKSRVT |
| | | | | ISKDTSKNQFSLKLSSVTAADTAVYYCARGGYWY |
| | | | | ATSYYFDYWGQGTLVTVSSASTKGPEVQLVESGG |
| | | | | GLVQPGGSLRLSCAASGFTFTDNWISWVRQAPGK |
| | | | | GLEWVGYISPNSGFTYYADSVKGRFTISADTSKN |
| | | | | TAYLQMNSLRAEDTAVYYCARDNFGGYFDYWGQG |
| | | | | TLVTVSS |
| 261 | DVD1393L | AB020VL | AB015VL | DIQMTQSPSSLSASVGDRVTITCRASQSISNNLN |
| | | | | WYQQKPGKAPKLLIYYTSRFHSGVPSRFSGSGSG |
| | | | | TDFTFTISSLQPEDIATYYCQQEHTLPYTFGQGT |
| | | | | KLEIKRTVAAPDIQMTQSPSSLSASVGDRVTITC |
| | | | | RASQDVSTAVAWYQQKPGKAPKLLIYSASFLYSG |
| | | | | VPSRFSGSGSGTDFTLTISSLQPEDFATTYYCQQ |
| | | | | SYTGTVTFGQGTKVEIKR |
| 262 | DVD1394H | AB015VH | AB020VH | EVQLVESGGGLVQPGGSLRLSCAASGFTFTDNWI |
| | | | | SWVRQAPGKGLEWVGYISPNSGFTYYADSVKGRF |
| | | | | TISADTSKNTAYLQMNSLRAEDTAVYYCARDNFG |
| | | | | GYFDYWGQGTLVTVSSASTKGPQVQLQESGPGLV |
| | | | | KPSETLSLTCTVSGFSLIGYDLNWIRQPPGKGLE |
| | | | | WIGIIWGDGTTDYNSAVKSRVTISKDTSKNQFSL |
| | | | | KLSSVTAADTAVYYCARGGYWYATSYYFDYWGQG |
| | | | | TLVTVSS |
| 263 | DVD1394L | AB015VL | AB020VL | DIQMTQSPSSLSASVGDRVTITCRASQDVSTAVA |
| | | | | WYQQKPGKAPKLLIYSASFLYSGVPSRFSGSGSG |
| | | | | TDFTLTISSLQPEDFATTYYCQQSYTGTVTFGQG |
| | | | | TKVEIKRTVAAPDIQMTQSPSSLSASVGDRVTIT |
| | | | | CRASQSISNNLNWYQQKPGKAPKLLIYYTSRFHS |
| | | | | GVPSRFSGSGSGTDFTFTISSLQPEDIATYYCQQ |
| | | | | EHTLPYTFGQGTKLEIKR |

### Example 2.43

### Generation of NGF (seq. 1) and P1GF DVD-Igs

TABLE 54

| | DVD | Outer | Inner | |
|---|---|---|---|---|
| SEQ | Variable | Variable | Variable | |
| ID | Domain | Domain | Domain | Sequence |
| NO | Name | Name | Name | 1234567890123456789012345678901234 |
| 264 | DVD1395H | AB020VH | AB047VH | QVQLQESGPGLVKPSETLSLTCTVSGFSLIGYDL |
| | | | | NWIRQPPGKGLEWIGIIWGDGTTDYNSAVKSRVT |
| | | | | ISKDTSKNQFSLKLSSVTAADTAVYYCARGGYWY |
| | | | | ATSYYFDYWGQGTLVTVSSASTKGPQVQLQQSGA |
| | | | | ELVKPGASVKISCKASGYTFTDYYINWVKLAPGQ |
| | | | | GLEWIGWIYPGSGNTKYNEKFKGKATLTIDTSSS |
| | | | | TAYMQLSSLTSEDTAVYFCVRDSPFFDYWGQGTL |
| | | | | LTVSS |
| 265 | DVD1395L | AB020VL | AB047VL | DIQMTQSPSSLSASVGDRVTITCRASQSISNNLN |
| | | | | WYQQKPGKAPKLLIYYTSRFHSGVPSRFSGSGSG |
| | | | | TDFTFTISSLQPEDIATYYCQQEHTLPYTFGQGT |
| | | | | KLEIKRTVAAPDIVLTQSPDSLAVSLGERVTMNC |
| | | | | KSSQSLLNSGMRKSFLAWYQQKPGQSPKLLIYWA |
| | | | | STRESGVPDRFTGSGSGTDFTLTISSVQAEDVAV |
| | | | | YYCKQSYHLFTFGSGTKLEIKR |
| 266 | DVD1396H | AB047VH | AB020VH | QVQLQQSGAELVKPGASVKISCKASGYTFTDYYI |
| | | | | NWVKLAPGQGLEWIGWIYPGSGNTKYNEKFKGKA |
| | | | | TLTIDTSSSTAYMQLSSLTSEDTAVYFCVRDSPF |
| | | | | FDYWGQGTLLTVSSASTKGPQVQLQESGPGLVKP |
| | | | | SETLSLTCTVSGFSLIGYDLNWIRQPPGKGLEWI |
| | | | | GIIWGDGTTDYNSAVKSRVTISKDTSKNQFSLKL |
| | | | | SSVTAADTAVYYCARGGYWYATSYYFDYWGQGTL |
| | | | | VTVSS |
| 267 | DVD1396L | AB047VL | AB020VL | DIVLTQSPDSLAVSLGERVTMNCKSSQSLLNSGM |
| | | | | RKSFLAWYQQKPGQSPKLLIYWASTRESGVPDRF |
| | | | | TGSGSGTDFTLTISSVQAEDVAVYYCKQSYHLFT |
| | | | | FGSGTKLEIKRTVAAPDIQMTQSPSSLSASVGDR |
| | | | | VTITCRASQSISNNLNWYQQKPGKAPKLLIYYTS |
| | | | | RFHSGVPSRFSGSGSGTDFTFTISSLQPEDIATY |
| | | | | YCQQEHTLPYTFGQGTKLEIKR |

### Example 2.44

### Generation of NGF (seq. 1) and RON (seq. 2) DVD-Igs

TABLE 55

| | DVD | Outer | Inner | |
|---|---|---|---|---|
| SEQ | Variable | Variable | Variable | |
| ID | Domain | Domain | Domain | Sequence |
| NO | Name | Name | Name | 1234567890123456789012345678901234 |
| 268 | DVD1397H | AB020VH | AB034VH | QVQLQESGPGLVKPSETLSLTCTVSGFSLIGYDL |
| | | | | NWIRQPPGKGLEWIGIIWGDGTTDYNSAVKSRVT |
| | | | | ISKDTSKNQFSLKLSSVTAADTAVYYCARGGYWY |
| | | | | ATSYYFDYWGQGTLVTVSSASTKGPQVQLQESGP |
| | | | | GLVKPSEILSLTCTVSGGSISSHYWSWVRQPPGK |
| | | | | GLEWIGYIYYSGSTNYNPSLKSRVTISVDTSKNQ |
| | | | | FSLNLSSVTAADTAVYYCARIPNYYDRSGYYPGY |
| | | | | WYFDLWGRGTLVTVSS |
| 269 | DVD1397L | AB020VL | AB034VL | DIQMTQSPSSLSASVGDRVTITCRASQSISNNLN |
| | | | | WYQQKPGKAPKLLIYYTSRFHSGVPSRFSGSGSG |
| | | | | TDFTFTISSLQPEDIATYYCQQEHTLPYTFGQGT |
| | | | | KLEIKRTVAAPQAVLTQPSSLSAPPGASASLTCT |
| | | | | LRSGFNVDSYRISWYQQKPGSPPQYLLRYKSDSD |
| | | | | KQQGSGVPSRFSGSKDASANAGILLISGLQSEDE |
| | | | | ADYYCMIWHSSAWVFGGGTKLTVLR |
| 270 | DVD1398H | AB034VH | AB020VH | QVQLQESGPGLVKPSEILSLTCTVSGGSISSHYW |
| | | | | SWVRQPPGKGLEWIGYIYYSGSTNYNPSLKSRVT |
| | | | | ISVDTSKNQFSLNLSSVTAADTAVYYCARIPNYY |
| | | | | DRSGYYPGYWYFDLWGRGTLVTVSSASTKGPQVQ |
| | | | | LQESGPGLVKPSETLSLTCTVSGFSLIGYDLNWI |
| | | | | RQPPGKGLEWIGIIWGDGTTDYNSAVKSRVTISK |
| | | | | DTSKNQFSLKLSSVTAADTAVYYCARGGYWYATS |
| | | | | YYFDYWGQGTLVTVSS |
| 271 | DVD1398L | AB034VL | AB020VL | QAVLTQPSSLSAPPGASASLTCTLRSGFNVDSYR |
| | | | | ISWYQQKPGSPPQYLLRYKSDSDKQQGSGVPSRF |
| | | | | SGSKDASANAGILLISGLQSEDEADYYCMIWHSS |
| | | | | AWVFGGGTKLTVLRQPKAAPDIQMTQSPSSLSAS |
| | | | | VGDRVTITCRASQSISNNLNWYQQKPGKAPKLLI |
| | | | | YYTSRFHSGVPSRFSGSGSGTDFTFTISSLQPED |
| | | | | IATYYCQQEHTLPYTFGQGTKLEIKR |

### Example 2.45

### Generation of NGF (seq. 1) and CD-20 DVD-Igs

TABLE 56

| | DVD | Outer | Inner | |
|---|---|---|---|---|
| SEQ | Variable | Variable | Variable | |
| ID | Domain | Domain | Domain | Sequence |
| NO | Name | Name | Name | 1234567890123456789012345678901234 |
| 272 | DVD1399H | AB020VH | AB001VH | QVQLQESGPGLVKPSETLSLTCTVSGFSLIGYDL |
| | | | | NWIRQPPGKGLEWIGIIWGDGTTDYNSAVKSRVT |
| | | | | ISKDTSKNQFSLKLSSVTAADTAVYYCARGGYWY |
| | | | | ATSYYFDYWGQGTLVTVSSASTKGPQVQLQQPGA |
| | | | | ELVKPGASVKMSCKASGYTFTSYNMHWVKQTPGR |
| | | | | GLEWIGAIYPGNGDTSYNQKFKGKATLTADKSSS |
| | | | | TAYMQLSSLTSEDSAVYYCARSTYYGGDWYFNVW |
| | | | | GAGTTVTVSA |
| 273 | DVD1399L | AB020VL | AB001VL | DIQMTQSPSSLSASVGDRVTITCRASQSISNNLN |
| | | | | WYQQKPGKAPKLLIYYTSRFHSGVPSRFSGSGSG |
| | | | | TDFTFTISSLQPEDIATYYCQQEHTLPYTFGQGT |
| | | | | KLEIKRTVAAPQIVLSQSPAILSPSPGEKVTMTC |
| | | | | RASSSVSYIHWFQQKPGSSPKPWIYATSNLASGV |
| | | | | PVRFSGSGSGTSYSLTISRVEAEDAATYYCQQWT |
| | | | | SNPPTFGGGTKLEIKR |
| 274 | DVD1400H | AB001VH | AB020VH | QVQLQQPGAELVKPGASVKMSCKASGYTFTSYNM |
| | | | | HWVKQTPGRGLEWIGAIYPGNGDTSYNQKFKGKA |
| | | | | TLTADKSSSTAYMQLSSLTSEDSAVYYCARSTYY |
| | | | | GGDWYFNVWGAGTTVTVSAASTKGPQVQLQESGP |
| | | | | GLVKPSETLSLTCTVSGFSLIGYDLNWIRQPPGK |
| | | | | GLEWIGIIWGDGTTDYNSAVKSRVTISKDTSKNQ |
| | | | | FSLKLSSVTAADTAVYYCARGGYWYATSYYFDYW |
| | | | | GQGTLVTVSS |
| 275 | DVD1400L | AB001VL | AB020VL | QIVLSQSPAILSPSPGEKVTMTCRASSSVSYIHW |
| | | | | FQQKPGSSPKPWIYATSNLASGVPVRFSGSGSGT |
| | | | | SYSLTISRVEAEDAATYYCQQWTSNPPTFGGGTK |
| | | | | LEIKRTVAAPDIQMTQSPSSLSASVGDRVTITCR |
| | | | | ASQSISNNLNWYQQKPGKAPKLLIYYTSRFHSGV |
| | | | | PSRFSGSGSGTDFTFTISSLQPEDIATYYCQQEH |
| | | | | TLPYTFGQGTKLEIKR |

### Example 2.46

### Generation of NGF (seq. 1) and EGFR DVD-Igs

TABLE 57

| | DVD | Outer | Inner | |
|---|---|---|---|---|
| SEQ | Variable | Variable | Variable | |
| ID | Domain | Domain | Domain | Sequence |
| NO | Name | Name | Name | 1234567890123456789012345678901234 |
| 276 | DVD1401H | AB020VH | AB003VH | QVQLQESGPGLVKPSETLSLTCTVSGFSLIGYDL |
| | | | | NWIRQPPGKGLEWIGIIWGDGTTDYNSAVKSRVT |
| | | | | ISKDTSKNQFSLKLSSVTAADTAVYYCARGGYWY |
| | | | | ATSYYFDYWGQGTLVTVSSASTKGPQVQLQESGP |
| | | | | GLVKPSETLSLTCTVSGGSVSSGDYYWTWIRQSP |
| | | | | GKGLEWIGHIYYSGNTNYNPSLKSRLTISIDTSK |
| | | | | TQFSLKLSSVTAADTAIYYCVRDRVTGAFDIWGQ |
| | | | | GTMVTVSS |
| 277 | DVD1401L | AB020VL | AB003VL | DIQMTQSPSSLSASVGDRVTITCRASQSISNNLN |
| | | | | WYQQKPGKAPKLLIYYTSRFHSGVPSRFSGSGSG |
| | | | | TDFTFTISSLQPEDIATYYCQQEHTLPYTFGQGT |
| | | | | KLEIKRTVAAPDIQMTQSPSSLSASVGDRVTITC |
| | | | | QASQDISNYLNWYQQKPGKAPKLLIYDASNLETG |
| | | | | VPSRFSGSGSGTDFTFTISSLQPEDIATYFCQHF |
| | | | | DHLPLAFGGGTKVEIKR |
| 278 | DVD1402H | AB003VH | AB020VH | QVQLQESGPGLVKPSETLSLTCTVSGGSVSSGDY |
| | | | | YWTWIRQSPGKGLEWIGHIYYSGNTNYNPSLKSR |
| | | | | LTISIDTSKTQFSLKLSSVTAADTAIYYCVRDRV |
| | | | | TGAFDIWGQGTMVTVSSASTKGPQVQLQESGPGL |
| | | | | VKPSETLSLTCTVSGFSLIGYDLNWIRQPPGKGL |
| | | | | EWIGIIWGDGTTDYNSAVKSRVTISKDTSKNQFS |
| | | | | LKLSSVTAADTAVYYCARGGYWYATSYYFDYWGQ |
| | | | | GTLVTVSS |
| 279 | DVD1402L | AB003VL | AB020VL | DIQMTQSPSSLSASVGDRVTITCQASQDISNYLN |
| | | | | WYQQKPGKAPKLLIYDASNLETGVPSRFSGSGSG |
| | | | | TDFTFTISSLQPEDIATYFCQHFDHLPLAFGGGT |
| | | | | KVEIKRTVAAPDIQMTQSPSSLSASVGDRVTITC |
| | | | | RASQSISNNLNWYQQKPGKAPKLLIYYTSRFHSG |
| | | | | VPSRFSGSGSGTDFTFTISSLQPEDIATYYCQQE |
| | | | | HTLPYTFGQGTKLEIKR |

### Example 2.47

### Generation of NGF (seq. 1) and HER2DVD-Igs

TABLE 58

| | DVD | Outer | Inner | |
|---|---|---|---|---|
| SEQ | Variable | Variable | Variable | |
| ID | Domain | Domain | Domain | Sequence |
| NO | Name | Name | Name | 1234567890123456789012345678901234 |
| 280 | DVD1403H | AB020VH | AB004VH | QVQLQESGPGLVKPSETLSLTCTVSGFSLIGYDL |
| | | | | NWIRQPPGKGLEWIGIIWGDGTTDYNSAVKSRVT |
| | | | | ISKDTSKNQFSLKLSSVTAADTAVYYCARGGYWY |
| | | | | ATSYYFDYWGQGTLVTVSSASTKGPEVQLVESGG |
| | | | | GLVQPGGSLRLSCAASGFNIKDTYIHWVRQAPGK |
| | | | | GLEWVARIYPTNGYTRYADSVKGRFTISADTSKN |
| | | | | TAYLQMNSLRAEDTAVYYCSRWGGDGFYAMDYWG |
| | | | | QGTLVTVSS |
| 281 | DVD1403L | AB020VL | AB004VL | DIQMTQSPSSLSASVGDRVTITCRASQSISNNLN |
| | | | | WYQQKPGKAPKLLIYYTSRFHSGVPSRFSGSGSG |
| | | | | TDFTFTISSLQPEDIATYYCQQEHTLPYTFGQGT |
| | | | | KLEIKRTVAAPDIQMTQSPSSLSASVGDRVTITC |
| | | | | RASQDVNTAVAWYQQKPGKAPKLLIYSASFLYSG |
| | | | | VPSRFSGSRSGTDFTLTISSLQPEDFATYYCQQH |
| | | | | YTTPPTFGQGTKVEIKR |
| 282 | DVD1404H | AB004VH | AB020VH | EVQLVESGGGLVQPGGSLRLSCAASGFNIKDTYI |
| | | | | HWVRQAPGKGLEWVARIYPTNGYTRYADSVKGRF |
| | | | | TISADTSKNTAYLQMNSLRAEDTAVYYCSRWGGD |
| | | | | GFYAMDYWGQGTLVTVSSASTKGPQVQLQESGPG |
| | | | | LVKPSETLSLTCTVSGFSLIGYDLNWIRQPPGKG |
| | | | | LEWIGIIWGDGTTDYNSAVKSRVTISKDTSKNQF |
| | | | | SLKLSSVTAADTAVYYCARGGYWYATSYYFDYWG |
| | | | | QGTLVTVSS |
| 283 | DVD1404L | AB004VL | AB020VL | DIQMTQSPSSLSASVGDRVTITCRASQDVNTAVA |
| | | | | WYQQKPGKAPKLLIYSASFLYSGVPSRFSGSRSG |
| | | | | TDFTLTISSLQPEDFATYYCQQHYTTPPTFGQGT |
| | | | | KVEIKRTVAAPDIQMTQSPSSLSASVGDRVTITC |
| | | | | RASQSISNNLNWYQQKPGKAPKLLIYYTSRFHSG |
| | | | | VPSRFSGSGSGTDFTFTISSLQPEDIATYYCQQE |
| | | | | HTLPYTFGQGTKLEIKR |

### Example 2.48

### Generation of NGF (seq. 1) and CD-19 DVD-Igs

TABLE 59

| | DVD | Outer | Inner | |
|---|---|---|---|---|
| SEQ | Variable | Variable | Variable | |
| ID | Domain | Domain | Domain | Sequence |
| NO | Name | Name | Name | 1234567890123456789012345678901234 |
| 284 | DVD1405H | AB020VH | AB006VH | QVQLQESGPGLVKPSETLSLTCTVSGFSLIGYDL |
| | | | | NWIRQPPGKGLEWIGIIWGDGTTDYNSAVKSRVT |
| | | | | ISKDTSKNQFSLKLSSVTAADTAVYYCARGGYWY |
| | | | | ATSYYFDYWGQGTLVTVSSASTKGPQVQLQQSGA |
| | | | | ELVRPGSSVKISCKASGYAFSSYWMNWVKQRPGQ |
| | | | | GLEWIGQIWPGDGDTNYNGKFKGKATLTADESSS |
| | | | | TAYMQLSSLASEDSAVYFCARRETTTVGRYYYAM |
| | | | | DYWGQGTSVTVSS |
| 285 | DVD1405L | AB020VL | AB006VL | DIQMTQSPSSLSASVGDRVTITCRASQSISNNLN |
| | | | | WYQQKPGKAPKLLIYYTSRFHSGVPSRFSGSGSG |
| | | | | TDFTFTISSLQPEDIATYYCQQEHTLPYTFGQGT |
| | | | | KLEIKRTVAAPDILLTQTPASLAVSLGQRATISC |
| | | | | KASQSVDYDGDSYLNWYQQIPGQPPKLLIYDASN |
| | | | | LVSGIPPRFSGSGSGTDFTLNIHPVEKVDAATYH |
| | | | | CQQSTEDPWTFGGGTKLEIKR |
| 286 | DVD1406H | AB006VH | AB020VH | QVQLQQSGAELVRPGSSVKISCKASGYAFSSYWM |
| | | | | NWVKQRPGQGLEWIGQIWPGDGDTNYNGKFKGKA |
| | | | | TLTADESSSTAYMQLSSLASEDSAVYFCARRETT |
| | | | | TVGRYYYAMDYWGQGTSVTVSSASTKGPQVQLQE |
| | | | | SGPGLVKPSETLSLTCTVSGFSLIGYDLNWIRQP |
| | | | | PGKGLEWIGIIWGDGTTDYNSAVKSRVTISKDTS |
| | | | | KNQFSLKLSSVTAADTAVYYCARGGYWYATSYYF |
| | | | | DYWGQGTLVTVSS |
| 287 | DVD1406L | AB006VL | AB020VL | DILLTQTPASLAVSLGQRATISCKASQSVDYDGD |
| | | | | SYLNWYQQIPGQPPKLLIYDASNLVSGIPPRFSG |
| | | | | SGSGTDFTLNIHPVEKVDAATYHCQQSTEDPWTF |
| | | | | GGGTKLEIKRTVAAPDIQMTQSPSSLSASVGDRV |
| | | | | TITCRASQSISNNLNWYQQKPGKAPKLLIYYTSR |
| | | | | FHSGVPSRFSGSGSGTDFTFTISSLQPEDIATYY |
| | | | | CQQEHTLPYTFGQGTKLEIKR |

### Example 2.49

### Generation of NGF (seq. 1) and CD-80 DVD-Igs

TABLE 60

| | DVD | Outer | Inner | |
|---|---|---|---|---|
| SEQ | Variable | Variable | Variable | |
| ID | Domain | Domain | Domain | Sequence |
| NO | Name | Name | Name | 1234567890123456789012345678901234 |
| 288 | DVD1407H | AB020VH | AB007VH | QVQLQESGPGLVKPSETLSLTCTVSGFSLIGYDL |
| | | | | NWIRQPPGKGLEWIGIIWGDGTTDYNSAVKSRVT |
| | | | | ISKDTSKNQFSLKLSSVTAADTAVYYCARGGYWY |
| | | | | ATSYYFDYWGQGTLVTVSSASTKGPQVQLQESGP |
| | | | | GLVKPSETLSLTCAVSGGSISGGYGWGWIRQPPG |
| | | | | KGLEWIGSFYSSSGNTYYNPSLKSQVTISTDTSK |
| | | | | NQFSLKLNSMTAADTAVYYCVRDRLFSVVGMVYN |
| | | | | NWFDVWGPGVLVTVSS |
| 289 | DVD1407L | AB020VL | AB007VL | DIQMTQSPSSLSASVGDRVTITCRASQSISNNLN |
| | | | | WYQQKPGKAPKLLIYYTSRFHSGVPSRFSGSGSG |
| | | | | TDFTFTISSLQPEDIATYYCQQEHTLPYTFGQGT |
| | | | | KLEIKRTVAAPESALTQPPSVSGAPGQKVTISCT |
| | | | | GSTSNIGGYDLHWYQQLPGTAPKLLIYDINKRPS |
| | | | | GISDRFSGSKSGTAASLAITGLQTEDEADYYCQS |
| | | | | YDSSLNAQVFGGGTRLTVLG |
| 290 | DVD1408H | AB007VH | AB020VH | QVQLQESGPGLVKPSETLSLTCAVSGGSISGGYG |
| | | | | WGWIRQPPGKGLEWIGSFYSSSGNTYYNPSLKSQ |
| | | | | VTISTDTSKNQFSLKLNSMTAADTAVYYCVRDRL |
| | | | | FSVVGMVYNNWFDVWGPGVLVTVSSASTKGPQVQ |
| | | | | LQESGPGLVKPSETLSLTCTVSGFSLIGYDLNWI |
| | | | | RQPPGKGLEWIGIIWGDGTTDYNSAVKSRVTISK |
| | | | | DTSKNQFSLKLSSVTAADTAVYYCARGGYWYATS |
| | | | | YYFDYWGQGTLVTVSS |
| 291 | DVD1408L | AB007VL | AB020VL | ESALTQPPSVSGAPGQKVTISCTGSTSNIGGYDL |
| | | | | HWYQQLPGTAPKLLIYDINKRPSGISDRFSGSKS |
| | | | | GTAASLAITGLQTEDEADYYCQSYDSSLNAQVFG |
| | | | | GGTRLTVLGQPKAAPDIQMTQSPSSLSASVGDRV |
| | | | | TITCRASQSISNNLNWYQQKPGKAPKLLIYYTSR |
| | | | | FHSGVPSRFSGSGSGTDFTFTISSLQPEDIATYY |
| | | | | CQQEHTLPYTFGQGTKLEIKR |

### Example 2.50

### Generation of NGF (seq. 1) and CD-22 DVD-Igs

TABLE 61

| | DVD | Outer | Inner | |
|---|---|---|---|---|
| SEQ | Variable | Variable | Variable | |
| ID | Domain | Domain | Domain | Sequence |
| NO | Name | Name | Name | 1234567890123456789012345678901234 |
| 292 | DVD1409H | AB020VH | AB008VH | QVQLQESGPGLVKPSETLSLTCTVSGFSLIGYDL |
| | | | | NWIRQPPGKGLEWIGIIWGDGTTDYNSAVKSRVT |
| | | | | ISKDTSKNQFSLKLSSVTAADTAVYYCARGGYWY |
| | | | | ATSYYFDYWGQGTLVTVSSASTKGPQVQLVQSGA |
| | | | | EVKKPGSSVKVSCKASGYTFTSYWLHWVRQAPGQ |
| | | | | GLEWIGYINPRNDYTEYNQNFKDKATITADESTN |
| | | | | TAYMELSSLRSEDTAFYFCARRDITTFYWGQGTT |
| | | | | VTVSS |
| 293 | DVD1409L | AB020VL | AB008VL | DIQMTQSPSSLSASVGDRVTITCRASQSISNNLN |
| | | | | WYQQKPGKAPKLLIYYTSRFHSGVPSRFSGSGSG |
| | | | | TDFTFTISSLQPEDIATYYCQQEHTLPYTFGQGT |
| | | | | KLEIKRTVAAPDIQLTQSPSSLSASVGDRVTMSC |
| | | | | KSSQSVLYSANHKNYLAWYQQKPGKAPKLLIYWA |
| | | | | STRESGVPSRFSGSGSGTDFTFTISSLQPEDIAT |
| | | | | YYCHQYLSSWTFGGGTKLEIKR |
| 294 | DVD1410H | AB008VH | AB020VH | QVQLVQSGAEVKKPGSSVKVSCKASGYTFTSYWL |
| | | | | HWVRQAPGQGLEWIGYINPRNDYTEYNQNFKDKA |
| | | | | TITADESTNTAYMELSSLRSEDTAFYFCARRDIT |
| | | | | TFYWGQGTTVTVSSASTKGPQVQLQESGPGLVKP |
| | | | | SETLSLTCTVSGFSLIGYDLNWIRQPPGKGLEWI |
| | | | | GIIWGDGTTDYNSAVKSRVTISKDTSKNQFSLKL |
| | | | | SSVTAADTAVYYCARGGYWYATSYYFDYWGQGTL |
| | | | | VTVSS |
| 295 | DVD1410L | AB008VL | AB020VL | DIQLTQSPSSLSASVGDRVTMSCKSSQSVLYSAN |
| | | | | HKNYLAWYQQKPGKAPKLLIYWASTRESGVPSRF |
| | | | | SGSGSGTDFTFTISSLQPEDIATYYCHQYLSSWT |
| | | | | FGGGTKLEIKRTVAAPDIQMTQSPSSLSASVGDR |
| | | | | VTITCRASQSISNNLNWYQQKPGKAPKLLIYYTS |
| | | | | RFHSGVPSRFSGSGSGTDFTFTISSLQPEDIATY |
| | | | | YCQQEHTLPYTFGQGTKLEIKR |

### Example 2.51

### Generation of NGF (seq. 1) and CD-40 DVD-Igs

TABLE 62

| | DVD | Outer | Inner | |
|---|---|---|---|---|
| SEQ | Variable | Variable | Variable | |
| ID | Domain | Domain | Domain | Sequence |
| NO | Name | Name | Name | 1234567890123456789012345678901234 |
| 296 | DVD1411H | AB020VH | AB009VH | QVQLQESGPGLVKPSETLSLTCTVSGFSLIGYDL |
| | | | | NWIRQPPGKGLEWIGIIWGDGTTDYNSAVKSRVT |
| | | | | ISKDTSKNQFSLKLSSVTAADTAVYYCARGGYWY |
| | | | | ATSYYFDYWGQGTLVTVSSASTKGPQVQLVESGG |
| | | | | GVVQPGRSLRLSCAASGFTFSSYGMHWVRQAPGK |
| | | | | GLEWVAVISYEESNRYHADSVKGRFTISRDNSKI |
| | | | | TLYLQMNSLRTEDTAVYYCARDGGIAAPGPDYWG |
| | | | | QGTLVTVSS |
| 297 | DVD1411L | AB020VL | AB009VL | DIQMTQSPSSLSASVGDRVTITCRASQSISNNLN |
| | | | | WYQQKPGKAPKLLIYYTSRFHSGVPSRFSGSGSG |
| | | | | TDFTFTISSLQPEDIATYYCQQEHTLPYTFGQGT |
| | | | | KLEIKRTVAAPDIVMTQSPLSLTVTPGEPASISC |
| | | | | RSSQSLLYSNGYNYLDWYLQKPGQSPQVLISLGS |
| | | | | NRASGVPDRFSGSGSGTDFTLKISRVEAEDVGVY |
| | | | | YCMQARQTPFTFGPGTKVDIRR |
| 298 | DVD1412H | AB009VH | AB020VH | QVQLVESGGGVVQPGRSLRLSCAASGFTFSSYGM |
| | | | | HWVRQAPGKGLEWVAVISYEESNRYHADSVKGRF |
| | | | | TISRDNSKITLYLQMNSLRTEDTAVYYCARDGGI |
| | | | | AAPGPDYWGQGTLVTVSSASTKGPQVQLQESGPG |
| | | | | LVKPSETLSLTCTVSGFSLIGYDLNWIRQPPGKG |
| | | | | LEWIGIIWGDGTTDYNSAVKSRVTISKDTSKNQF |
| | | | | SLKLSSVTAADTAVYYCARGGYWYATSYYFDYWG |
| | | | | QGTLVTVSS |
| 299 | DVD1412L | AB009VL | AB020VL | DIVMTQSPLSLTVTPGEPASISCRSSQSLLYSNG |
| | | | | YNYLDWYLQKPGQSPQVLISLGSNRASGVPDRFS |
| | | | | GSGSGTDFTLKISRVEAEDVGVYYCMQARQTPFT |
| | | | | FGPGTKVDIRRTVAAPDIQMTQSPSSLSASVGDR |
| | | | | VTITCRASQSISNNLNWYQQKPGKAPKLLIYYTS |
| | | | | RFHSGVPSRFSGSGSGTDFTFTISSLQPEDIATY |
| | | | | YCQQEHTLPYTFGQGTKLEIKR |

### Example 2.52

### Generation of NGF (seq. 1) and cMET DVD-Igs

TABLE 63

| | DVD | Outer | Inner | |
|---|---|---|---|---|
| SEQ | Variable | Variable | Variable | |
| ID | Domain | Domain | Domain | Sequence |
| NO | Name | Name | Name | 1234567890123456789012345678901234 |
| 300 | DVD1413H | AB020VH | AB013VH | QVQLQESGPGLVKPSETLSLTCTVSGFSLIGYDL |
| | | | | NWIRQPPGKGLEWIGIIWGDGTTDYNSAVKSRVT |
| | | | | ISKDTSKNQFSLKLSSVTAADTAVYYCARGGYWY |
| | | | | ATSYYFDYWGQGTLVTVSSASTKGPQVQLQQSGP |
| | | | | ELVRPGASVKWSCPASGYTFTSYWLHWVKKQRPG |
| | | | | QGLEWIGMIDPSNSDTRfNPPNFKDKATLNVDRS |
| | | | | SNTAYNLLSSLTSADSAVYYCATYGSYVSPLDYW |
| | | | | GQGTSVYVSS |
| 301 | DVD1413L | AB020VL | AB013VL | DIQMTQSPSSLSASVGDRVTITCRASQSISNNLN |
| | | | | WYQQKPGKAPKLLIYYTSRFHSGVPSRFSGSGSG |
| | | | | TDFTFTISSLQPEDIATYYCQQEHTLPYTFGQGT |
| | | | | KLEIKRTVAAPDIMMSQSPSSLTVSVGEKVTVSC |
| | | | | KSSQSLLVTSSQKNYLAWYQQKPQQSPKLLIYWA |
| | | | | STRESGVPDRFTGSGSGTDFTLTITSVKADDLAV |
| | | | | YYCQQYYAYPWTFGDGTKLEIKR |
| 302 | DVD1414H | AB013VH | AB020VH | QVQLQQSGPELVRPGASVKWSCPASGYTFTSYWL |
| | | | | HWVKKQRPGQGLEWIGMIDPSNSDTRfNPPNFKD |
| | | | | KATLNVDRSSNTAYNLLSSLTSADSAVYYCATYG |
| | | | | SYVSPLDYWGQGTSVYVSSASTKGPQVQLQESGP |
| | | | | GLVKPSETLSLTCTVSGFSLIGYDLNWIRQPPGK |
| | | | | GLEWIGIIWGDGTTDYNSAVKSRVTISKDTSKNQ |
| | | | | FSLKLSSVTAADTAVYYCARGGYWYATSYYFDYW |
| | | | | GQGTLVTVSS |
| 303 | DVD1414L | AB013VL | AB020VL | DIMMSQSPSSLTVSVGEKVTVSCKSSQSLLVTSS |
| | | | | QKNYLAWYQQKPQQSPKLLIYWASTRESGVPDRF |
| | | | | TGSGSGTDFTLTITSVKADDLAVYYCQQYYAYPW |
| | | | | TFGDGTKLEIKRTVAAPDIQMTQSPSSLSASVGD |
| | | | | RVTITCRASQSISNNLNWYQQKPGKAPKLLIYYT |
| | | | | SRFHSGVPSRFSGSGSGTDFTFTISSLQPEDIAT |
| | | | | YYCQQEHTLPYTFGQGTKLEIKR |

### Example 2.53

### Generation of NGF (seq. 1) and NRP1 (seq. 1) DVD-Igs

TABLE 64

| | DVD | Outer | Inner | |
|---|---|---|---|---|
| SEQ | Variable | Variable | Variable | |
| ID | Domain | Domain | Domain | Sequence |
| NO | Name | Name | Name | 1234567890123456789012345678901234 |
| 304 | DVD1415H | AB020VH | AB016VH | QVQLQESGPGLVKPSETLSLTCTVSGFSLIGYDL |
| | | | | NWIRQPPGKGLEWIGIIWGDGTTDYNSAVKSRVT |
| | | | | ISKDTSKNQFSLKLSSVTAADTAVYYCARGGYWY |
| | | | | ATSYYFDYWGQGTLVTVSSASTKGPEVQLVESGG |
| | | | | GLVQPGGSLRLSCAASGFSFSSEPISWVRQAPGK |
| | | | | GLEWVSSITGKNGYTYYADSVKGRFTISADTSKN |
| | | | | TAYLQMNSLRAEDTAVYYCARWGKKVYGMDVWGQ |
| | | | | GTLVTVSS |
| 305 | DVD1415L | AB020VL | AB016VL | DIQMTQSPSSLSASVGDRVTITCRASQSISNNLN |
| | | | | WYQQKPGKAPKLLIYYTSRFHSGVPSRFSGSGSG |
| | | | | TDFTFTISSLQPEDIATYYCQQEHTLPYTFGQGT |
| | | | | KLEIKRTVAAPDIQMTQSPSSLSASVGDRVTITC |
| | | | | RASQSISSYLAWYQQKPGKAPKLLIYGASSRASG |
| | | | | VPSRFSGSGSGTDFTLTISSLQPEDFATYYCQQY |
| | | | | MSVPITFGQGTKVEIKR |
| 306 | DVD1416H | AB016VH | AB020VH | EVQLVESGGGLVQPGGSLRLSCAASGFSFSSEPI |
| | | | | SWVRQAPGKGLEWVSSITGKNGYTYYADSVKGRF |
| | | | | TISADTSKNTAYLQMNSLRAEDTAVYYCARWGKK |
| | | | | VYGMDVWGQGTLVTVSSASTKGPQVQLQESGPGL |
| | | | | VKPSETLSLTCTVSGFSLIGYDLNWIRQPPGKGL |
| | | | | EWIGIIWGDGTTDYNSAVKSRVTISKDTSKNQFS |
| | | | | LKLSSVTAADTAVYYCARGGYWYATSYYFDYWGQ |
| | | | | GTLVTVSS |
| 307 | DVD1416L | AB016VL | AB020VL | DIQMTQSPSSLSASVGDRVTITCRASQSISSYLA |
| | | | | WYQQKPGKAPKLLIYGASSRASGVPSRFSGSGSG |
| | | | | TDFTLTISSLQPEDFATYYCQQYMSVPITFGQGT |
| | | | | KVEIKRTVAAPDIQMTQSPSSLSASVGDRVTITC |
| | | | | RASQSISNNLNWYQQKPGKAPKLLIYYTSRFHSG |
| | | | | VPSRFSGSGSGTDFTFTISSLQPEDIATYYCQQE |
| | | | | HTLPYTFGQGTKLEIKR |

### Example 2.54

### Generation of NGF (seq. 1) and NRP1 (seq. 2) DVD-Igs

TABLE 65

| | DVD | Outer | Inner | |
|---|---|---|---|---|
| SEQ | Variable | Variable | Variable | |
| ID | Domain | Domain | Domain | Sequence |
| NO | Name | Name | Name | 1234567890123456789012345678901234 |
| 308 | DVD1417H | AB020VH | AB035VH | QVQLQESGPGLVKPSETLSLTCTVSGFSLIGYDL |
| | | | | NWIRQPPGKGLEWIGIIWGDGTTDYNSAVKSRVT |
| | | | | ISKDTSKNQFSLKLSSVTAADTAVYYCARGGYWY |
| | | | | ATSYYFDYWGQGTLVTVSSASTKGPEVQLVESGG |
| | | | | GLVQPGGSLRLSCAASGFTFSSYAMSWVRQAPGK |
| | | | | GLEWVSQISPAGGYTNYADSVKGRFTISADTSKN |
| | | | | TAYLQMNSLRAEDTAVYYCARELPYYRMSKVMDV |
| | | | | QGQGTLVTVSS |
| 309 | DVD1417L | AB020VL | AB035VL | DIQMTQSPSSLSASVGDRVTITCRASQSISNNLN |
| | | | | WYQQKPGKAPKLLIYYTSRFHSGVPSRFSGSGSG |
| | | | | TDFTFTISSLQPEDIATYYCQQEHTLPYTFGQGT |
| | | | | KLEIKRTVAAPDIQMTQSPSSLSASVGDRVTITC |
| | | | | RASQYFSSYLAWYQQKPGKAPKLLIYGASSRASG |
| | | | | VPSRFSGSGSGTDFTLTISSLQPEDFATYYCQQY |
| | | | | LGSPPTFGQGTKVEIKR |
| 310 | DVD1418H | AB035VH | AB020VH | EVQLVESGGGLVQPGGSLRLSCAASGFTFSSYAM |
| | | | | SWVRQAPGKGLEWVSQISPAGGYTNYADSVKGRF |
| | | | | TISADTSKNTAYLQMNSLRAEDTAVYYCARELPY |
| | | | | YRMSKVMDVQGQGTLVTVSSASTKGPQVQLQESG |
| | | | | PGLVKPSETLSLTCTVSGFSLIGYDLNWIRQPPG |
| | | | | KGLEWIGIIWGDGTTDYNSAVKSRVTISKDTSKN |
| | | | | QFSLKLSSVTAADTAVYYCARGGYWYATSYYFDY |
| | | | | WGQGTLVTVSS |
| 311 | DVD1418L | AB035VL | AB020VL | DIQMTQSPSSLSASVGDRVTITCRASQYFSSYLA |
| | | | | WYQQKPGKAPKLLIYGASSRASGVPSRFSGSGSG |
| | | | | TDFTLTISSLQPEDFATYYCQQYLGSPPTFGQGT |
| | | | | KVEIKRTVAAPDIQMTQSPSSLSASVGDRVTITC |
| | | | | RASQSISNNLNWYQQKPGKAPKLLIYYTSRFHSG |
| | | | | VPSRFSGSGSGTDFTFTISSLQPEDIATYYCQQE |
| | | | | HTLPYTFGQGTKLEIKR |

### Example 2.55

### Generation of NGF (seq. 1) and CD-3 (seq. 2) DVD-Igs

TABLE 66

| | DVD | Outer | Inner | |
|---|---|---|---|---|
| SEQ | Variable | Variable | Variable | |
| ID | Domain | Domain | Domain | Sequence |
| NO | Name | Name | Name | 1234567890123456789012345678901234 |
| 312 | DVD1421H | AB020VH | AB039VH | QVQLQESGPGLVKPSETLSLTCTVSGFSLIGYDL |
| | | | | NWIRQPPGKGLEWIGIIWGDGTTDYNSAVKSRVT |
| | | | | ISKDTSKNQFSLKLSSVTAADTAVYYCARGGYWY |
| | | | | ATSYYFDYWGQGTLVTVSSASTKGPQVQLQQSGA |
| | | | | ELARPGASVKMSCKASGYTFTRYTMHWVKQRPGQ |
| | | | | GLEWIGYINPSRGYTNYNQKFKDKATLTTDKSSS |
| | | | | TAYMQLSSLTSEDSAVYYCARYYDDHYCLDYWGQ |
| | | | | GTTLTVSS |
| 313 | DVD1421L | AB020VL | AB039VL | DIQMTQSPSSLSASVGDRVTITCRASQSISNNLN |
| | | | | WYQQKPGKAPKLLIYYTSRFHSGVPSRFSGSGSG |
| | | | | TDFTFTISSLQPEDIATYYCQQEHTLPYTFGQGT |
| | | | | KLEIKRTVAAPQIVLTQSPAIMSASPGEKVTMTC |
| | | | | SASSSVSYMNWYQQKSGTSPKRWIYDTSKLASGV |
| | | | | PAHFRGSGSGTSYSLTISGMEAEDAATYYCQQWS |
| | | | | SNPFTFGSGTKLEINR |
| 314 | DVD1422H | AB039VH | AB020VH | QVQLQQSGAELARPGASVKMSCKASGYTFTRYTM |
| | | | | HWVKQRPGQGLEWIGYINPSRGYTNYNQKFKDKA |
| | | | | TLTTDKSSSTAYMQLSSLTSEDSAVYYCARYYDD |
| | | | | HYCLDYWGQGTTLTVSSASTKGPQVQLQESGPGL |
| | | | | VKPSETLSLTCTVSGFSLIGYDLNWIRQPPGKGL |
| | | | | EWIGIIWGDGTTDYNSAVKSRVTISKDTSKNQFS |
| | | | | LKLSSVTAADTAVYYCARGGYWYATSYYFDYWGQ |
| | | | | GTLVTVSS |
| 315 | DVD1422L | AB039VL | AB020VL | QIVLTQSPAIMSASPGEKVTMTCSASSSVSYMNW |
| | | | | YQQKSGTSPKRWIYDTSKLASGVPAHFRGSGSGT |
| | | | | SYSLTISGMEAEDAATYYCQQWSSNPFTFGSGTK |
| | | | | LEINRTVAAPDIQMTQSPSSLSASVGDRVTITCR |
| | | | | ASQSISNNLNWYQQKPGKAPKLLIYYTSRFHSGV |
| | | | | PSRFSGSGSGTDFTFTISSLQPEDIATYYCQQEH |
| | | | | TLPYTFGQGTKLEIKR |

### Example 2.56

### Generation of NGF (seq. 1) and ErbB3 (seq. 3) DVD-Igs

TABLE 67

| | DVD | Outer | Inner | |
|---|---|---|---|---|
| SEQ | Variable | Variable | Variable | |
| ID | Domain | Domain | Domain | Sequence |
| NO | Name | Name | Name | 1234567890123456789012345678901234 |
| 316 | DVD1425H | AB020VH | AB016VH | QVQLQESGPGLVKPSETLSLTCTVSGFSLIGYDL |
| | | | | NWIRQPPGKGLEWIGIIWGDGTTDYNSAVKSRVT |
| | | | | ISKDTSKNQFSLKLSSVTAADTAVYYCARGGYWY |
| | | | | ATSYYFDYWGQGTLVTVSSASTKGPEVQLLESGG |
| | | | | GLVQPGGSLRLSCAASGFTFSHYVMAWVRQAPGK |
| | | | | GLEWVSSISSSGGWTLYADSVKGRFTISRDNSKN |
| | | | | TLYLQMNSLRAEDTAVYYCTRGLKMATIFDYWGQ |
| | | | | GTLVTVSS |
| 317 | DVD1425L | AB020VL | AB016VL | DIQMTQSPSSLSASVGDRVTITCRASQSISNNLN |
| | | | | WYQQKPGKAPKLLIYYTSRFHSGVPSRFSGSGSG |
| | | | | TDFTFTISSLQPEDIATYYCQQEHTLPYTFGQGT |
| | | | | KLEIKRTVAAPQSALTQPASVSGSPGQSITISCT |
| | | | | GTSSDVGSYNVVSWYQQHPGKAPKLIIYEVSQRP |
| | | | | SGVSNRFSGSKSGNTASLTISGLQTEDEADYYCC |
| | | | | SYAGSSIFVIFGGGTKVTVLG |
| 318 | DVD1426H | AB016VH | AB020VH | EVQLLESGGGLVQPGGSLRLSCAASGFTFSHYVM |
| | | | | AWVRQAPGKGLEWVSSISSSGGWTLYADSVKGRF |
| | | | | TISRDNSKNTLYLQMNSLRAEDTAVYYCTRGLKM |
| | | | | ATIFDYWGQGTLVTVSSASTKGPQVQLQESGPGL |
| | | | | VKPSETLSLTCTVSGFSLIGYDLNWIRQPPGKGL |
| | | | | EWIGIIWGDGTTDYNSAVKSRVTISKDTSKNQFS |
| | | | | LKLSSVTAADTAVYYCARGGYWYATSYYFDYWGQ |
| | | | | GTLVTVSS |
| 319 | DVD1426L | AB016VL | AB020VL | QSALTQPASVSGSPGQSITISCTGTSSDVGSYNV |
| | | | | VSWYQQHPGKAPKLIIYEVSQRPSGVSNRFSGSK |
| | | | | SGNTASLTISGLQTEDEADYYCCSYAGSSIFVIF |
| | | | | GGGTKVTVLGQPKAAPDIQMTQSPSSLSASVGDR |
| | | | | VTITCRASQSISNNLNWYQQKPGKAPKLLIYYTS |
| | | | | RFHSGVPSRFSGSGSGTDFTFTISSLQPEDIATY |
| | | | | YCQQEHTLPYTFGQGTKLEIKR |

### Example 2.57

### Generation of NGF (seq. 1) and VEGF (seq. 2) DVD-Igs

TABLE 68

| | DVD | Outer | Inner | |
|---|---|---|---|---|
| SEQ | Variable | Variable | Variable | |
| ID | Domain | Domain | Domain | Sequence |
| NO | Name | Name | Name | 1234567890123456789012345678901234 |
| 320 | DVD1427H | AB020VH | AB070VH | QVQLQESGPGLVKPSETLSLTCTVSGFSLIGYDL |
| | | | | NWIRQPPGKGLEWIGIIWGDGTTDYNSAVKSRVT |
| | | | | ISKDTSKNQFSLKLSSVTAADTAVYYCARGGYWY |
| | | | | ATSYYFDYWGQGTLVTVSSASTKGPEVQLVESGG |
| | | | | GLVQPGGSLRLSCAASGFTISDYWIHWVRQAPGK |
| | | | | GLEWVAGITPAGGYTYYADSVKGRFTISADTSKN |
| | | | | TAYLQMNSLRAEDTAVYYCARFVFFLPYAMDYWG |
| | | | | QGTLVTVSS |
| 321 | DVD1427L | AB020VL | AB070VL | DIQMTQSPSSLSASVGDRVTITCRASQSISNNLN |
| | | | | WYQQKPGKAPKLLIYYTSRFHSGVPSRFSGSGSG |
| | | | | TDFTFTISSLQPEDIATYYCQQEHTLPYTFGQGT |
| | | | | KLEIKRTVAAPDIQMTQSPSSLSASVGDRVTITC |
| | | | | RASQDVSTAVAWYQQKPGKAPKLLIYSASFLYSG |
| | | | | VPSRFSGSGSGTDFTLTISSLQPEDFATYYCQQS |
| | | | | YTTPPTFGQGTKVEIKR |
| 322 | DVD1428H | AB070VH | AB020VH | EVQLVESGGGLVQPGGSLRLSCAASGFTISDYWI |
| | | | | HWVRQAPGKGLEWVAGITPAGGYTYYADSVKGRF |
| | | | | TISADTSKNTAYLQMNSLRAEDTAVYYCARFVFF |
| | | | | LPYAMDYWGQGTLVTVSSASTKGPQVQLQESGPG |
| | | | | LVKPSETLSLTCTVSGFSLIGYDLNWIRQPPGKG |
| | | | | LEWIGIIWGDGTTDYNSAVKSRVTISKDTSKNQF |
| | | | | SLKLSSVTAADTAVYYCARGGYWYATSYYFDYWG |
| | | | | QGTLVTVSS |
| 323 | DVD1428L | AB070VL | AB020VL | DIQMTQSPSSLSASVGDRVTITCRASQDVSTAVA |
| | | | | WYQQKPGKAPKLLIYSASFLYSGVPSRFSGSGSG |
| | | | | TDFTLTISSLQPEDFATYYCQQSYTTPPTFGQGT |
| | | | | KVEIKRTVAAPDIQMTQSPSSLSASVGDRVTITC |
| | | | | RASQSISNNLNWYQQKPGKAPKLLIYYTSRFHSG |
| | | | | VPSRFSGSGSGTDFTFTISSLQPEDIATYYCQQE |
| | | | | HTLPYTFGQGTKLEIKR |

### Example 2.58

### Generation of NGF (seq. 1) and VEGF (seq. 4) DVD-Igs

TABLE 69

| | DVD | Outer | Inner | |
|---|---|---|---|---|
| SEQ | Variable | Variable | Variable | |
| ID | Domain | Domain | Domain | Sequence |
| NO | Name | Name | Name | 1234567890123456789012345678901234 |
| 324 | DVD1429H | AB020VH | AB117VH | QVQLQESGPGLVKPSETLSLTCTVSGFSLIGYDL |
| | | | | NWIRQPPGKGLEWIGIIWGDGTTDYNSAVKSRVT |
| | | | | ISKDTSKNQFSLKLSSVTAADTAVYYCARGGYWY |
| | | | | ATSYYFDYWGQGTLVTVSSASTKGPEVQLVESGG |
| | | | | GLVQPGGSLRLSCAASGFTINASWIHWVRQAPGK |
| | | | | GLEWVGAIYPYSGYTNYADSVKGRFTISADTSKN |
| | | | | TAYLQMNSLRAEDTAVYYCARWGHSTSPWAMDYW |
| | | | | GQGTLVTVSS |
| 325 | DVD1429L | AB020VL | AB117VL | DIQMTQSPSSLSASVGDRVTITCRASQSISNNLN |
| | | | | WYQQKPGKAPKLLIYYTSRFHSGVPSRFSGSGSG |
| | | | | TDFTFTISSLQPEDIATYYCQQEHTLPYTFGQGT |
| | | | | KLEIKRTVAAPDIQMTQSPSSLSASVGDRVTITC |
| | | | | RASQVIRRSLAWYQQKPGKAPKLLIYAASNLASG |
| | | | | VPSRFSGSGSGTDFTLTISSLQPEDFATYYCQQS |
| | | | | NTSPLTFGQGTKVEIKR |
| 326 | DVD1430H | AB117VH | AB020VH | EVQLVESGGGLVQPGGSLRLSCAASGFTINASWI |
| | | | | HWVRQAPGKGLEWVGAIYPYSGYTNYADSVKGRF |
| | | | | TISADTSKNTAYLQMNSLRAEDTAVYYCARWGHS |
| | | | | TSPWAMDYWGQGTLVTVSSASTKGPQVQLQESGP |
| | | | | GLVKPSETLSLTCTVSGFSLIGYDLNWIRQPPGK |
| | | | | GLEWIGIIWGDGTTDYNSAVKSRVTISKDTSKNQ |
| | | | | FSLKLSSVTAADTAVYYCARGGYWYATSYYFDYW |
| | | | | GQGTLVTVSS |
| 327 | DVD1430L | AB117VL | AB020VL | DIQMTQSPSSLSASVGDRVTITCRASQVIRRSLA |
| | | | | WYQQKPGKAPKLLIYAASNLASGVPSRFSGSGSG |
| | | | | TDFTLTISSLQPEDFATYYCQQSNTSPLTFGQGT |
| | | | | KVEIKRTVAAPDIQMTQSPSSLSASVGDRVTITC |
| | | | | RASQSISNNLNWYQQKPGKAPKLLIYYTSRFHSG |
| | | | | VPSRFSGSGSGTDFTFTISSLQPEDIATYYCQQE |
| | | | | HTLPYTFGQGTKLEIKR |

### Example 2.59

### Generation of NGF (seq. 1) and VEGF (seq. 3) DVD-Igs

TABLE 70

| | DVD | Outer | Inner | |
|---|---|---|---|---|
| SEQ | Variable | Variable | Variable | |
| ID | Domain | Domain | Domain | Sequence |
| NO | Name | Name | Name | 1234567890123456789012345678901234 |
| 328 | DVD1431H | AB020VH | AB103VH | QVQLQESGPGLVKPSETLSLTCTVSGFSLIGYDL |
| | | | | NWIRQPPGKGLEWIGIIWGDGTTDYNSAVKSRVT |
| | | | | ISKDTSKNQFSLKLSSVTAADTAVYYCARGGYWY |
| | | | | ATSYYFDYWGQGTLVTVSSASTKGPEVQLVESGG |
| | | | | GLVQPGGSLRLSCAASGYDFTHYGMNWVRQAPGK |
| | | | | GLEWVGWINTYTGEPTYAADFKRRFTFSLDTSKS |
| | | | | TAYLQMNSLRAEDTAVYYCAKYPYYYGTSHWYFD |
| | | | | VWGQGTLVTVSS |
| 329 | DVD1431L | AB020VL | AB103VL | DIQMTQSPSSLSASVGDRVTITCRASQSISNNLN |
| | | | | WYQQKPGKAPKLLIYYTSRFHSGVPSRFSGSGSG |
| | | | | TDFTFTISSLQPEDIATYYCQQEHTLPYTFGQGT |
| | | | | KLEIKRTVAAPDIQLTQSPSSLSASVGDRVTITC |
| | | | | SASQDISNYLNWYQQKPGKAPKVLIYFTSSLHSG |
| | | | | VPSRFSGSGSGTDFTLTISSLQPEDFATYYCQQY |
| | | | | STVPWTFGQGTKVEIKR |
| 330 | DVD1432H | AB103VH | AB020VH | EVQLVESGGGLVQPGGSLRLSCAASGYDFTHYGM |
| | | | | NWVRQAPGKGLEWVGWINTYTGEPTYAADFKRRF |
| | | | | TFSLDTSKSTAYLQMNSLRAEDTAVYYCAKYPYY |
| | | | | YGTSHWYFDVWGQGTLVTVSSASTKGPQVQLQES |
| | | | | GPGLVKPSETLSLTCTVSGFSLIGYDLNWIRQPP |
| | | | | GKGLEWIGIIWGDGTTDYNSAVKSRVTISKDTSK |
| | | | | NQFSLKLSSVTAADTAVYYCARGGYWYATSYYFD |
| | | | | YWGQGTLVTVSS |
| 331 | DVD1432L | AB103VL | AB020VL | DIQLTQSPSSLSASVGDRVTITCSASQDISNYLN |
| | | | | WYQQKPGKAPKVLIYFTSSLHSGVPSRFSGSGSG |
| | | | | TDFTLTISSLQPEDFATYYCQQYSTVPWTFGQGT |
| | | | | KVEIKRTVAAPDIQMTQSPSSLSASVGDRVTITC |
| | | | | RASQSISNNLNWYQQKPGKAPKLLIYYTSRFHSG |
| | | | | VPSRFSGSGSGTDFTFTISSLQPEDIATYYCQQE |
| | | | | HTLPYTFGQGTKLEIKR |

### Example 2.60

### Generation of NGF (seq. 1) and EGFR (seq. 3) DVD-Igs

TABLE 71

| | DVD | Outer | Inner | |
|---|---|---|---|---|
| SEQ | Variable | Variable | Variable | |
| ID | Domain | Domain | Domain | Sequence |
| NO | Name | Name | Name | 1234567890123456789012345678901234 |
| 332 | DVD1433H | AB020VH | AB064VH | QVQLQESGPGLVKPSETLSLTCTVSGFSLIGYDL |
| | | | | NWIRQPPGKGLEWIGIIWGDGTTDYNSAVKSRVT |
| | | | | ISKDTSKNQFSLKLSSVTAADTAVYYCARGGYWY |
| | | | | ATSYYFDYWGQGTLVTVSSASTKGPQVQLQESGP |
| | | | | GLVKPSQTLSLTCTVSGYSISSDFAWNWIRQPPG |
| | | | | KGLEWMGYISYSGNTRYQPSLKSRITISRDTSKN |
| | | | | QFFLKLNSVTAADTATYYCVTAGRGFPYWGQGTL |
| | | | | VTVSS |
| 333 | DVD1433L | AB020VL | AB064VL | DIQMTQSPSSLSASVGDRVTITCRASQSISNNLN |
| | | | | WYQQKPGKAPKLLIYYTSRFHSGVPSRFSGSGSG |
| | | | | TDFTFTISSLQPEDIATYYCQQEHTLPYTFGQGT |
| | | | | KLEIKRTVAAPDIQMTQSPSSMSVSVGDRVTITC |
| | | | | HSSQDINSNIGWLQQKPGKSFKGLIYHGTNLDDG |
| | | | | VPSRFSGSGSGTDYTLTISSLQPEDFATYYCVQY |
| | | | | AQFPWTFGGGTKLEIKR |
| 334 | DVD1434H | AB064VH | AB020VH | QVQLQESGPGLVKPSQTLSLTCTVSGYSISSDFA |
| | | | | WNWIRQPPGKGLEWMGYISYSGNTRYQPSLKSRI |
| | | | | TISRDTSKNQFFLKLNSVTAADTATYYCVTAGRG |
| | | | | FPYWGQGTLVTVSSASTKGPQVQLQESGPGLVKP |
| | | | | SETLSLTCTVSGFSLIGYDLNWIRQPPGKGLEWI |
| | | | | GIIWGDGTTDYNSAVKSRVTISKDTSKNQFSLKL |
| | | | | SSVTAADTAVYYCARGGYWYATSYYFDYWGQGTL |
| | | | | VTVSS |
| 335 | DVD1434L | AB064VL | AB020VL | DIQMTQSPSSMSVSVGDRVTITCHSSQDINSNIG |
| | | | | WLQQKPGKSFKGLIYHGTNLDDGVPSRFSGSGSG |
| | | | | TDYTLTISSLQPEDFATYYCVQYAQFPWTFGGGT |
| | | | | KLEIKRTVAAPDIQMTQSPSSLSASVGDRVTITC |
| | | | | RASQSISNNLNWYQQKPGKAPKLLIYYTSRFHSG |
| | | | | VPSRFSGSGSGTDFTFTISSLQPEDIATYYCQQE |
| | | | | HTLPYTFGQGTKLEIKR |

### Example 2.61

### Cloning Vector Sequences Used to Clone Parent Antibody and DVD-Ig Sequences

TABLE 72

| | Vector | Nucleotide sequences |
|---|---|---|
| SEQ ID NO | name | 123456789012345678901234567890123456789012345678901 |
| 336 | V1 | GCGTCGACCAAGGGCCCATCGGTCTTCCCCCTGGCACCCTCCTCCAAGAGC |
| | | ACCTCTGGGGGCACAGCGGCCCTGGGCTGCCTGGTCAAGGACTACTTCCCC |
| | | GAACCGGTGACGGTGTCGTGGAACTCAGGCGCCCTGACCAGCGGCGTGCAC |
| | | ACCTTCCCGGCTGTCCTACAGTCCTCAGGACTCTACTCCCTCAGCAGCGTG |
| | | GTGACCGTGCCCTCCAGCAGCTTGGGCACCCAGACCTACATCTGCAACGTG |
| | | AATCACAAGCCCAGCAACACCAAGGTGGACAAGAAAGTTGAGCCCAAATCT |
| | | TGTGACAAAACTCACACATGCCCACCGTGCCCAGCACCTGAACTCCTGGGG |
| | | GGACCGTCAGTCTTCCTCTTCCCCCCAAAACCCAAGGACACCCTCATGATC |
| | | TCCCGGACCCCTGAGGTCACATGCGTGGTGGTGGACGTGAGCCACGAAGAC |
| | | CCTGAGGTCAAGTTCAACTGGTACGTGGACGGCGTGGAGGTGCATAATGCC |
| | | AAGACAAAGCCGCGGGAGGAGCAGTACAACAGCACGTACCGTGTGGTCAGC |
| | | GTCCTCACCGTCCTGCACCAGGACTGGCTGAATGGCAAGGAGTACAAGTGC |
| | | AAGGTCTCCAACAAAGCCCTCCCAGCCCCCATCGAGAAAACCATCTCCAAA |
| | | GCCAAAGGGCAGCCCCGAGAACCACAGGTGTACACCCTGCCCCCATCCCGC |
| | | GAGGAGATGACCAAGAACCAGGTCAGCCTGACCTGCCTGGTCAAAGGCTTC |
| | | TATCCCAGCGACATCGCCGTGGAGTGGGAGAGCAATGGGCAGCCGGAGAAC |
| | | AACTACAAGACCACGCCTCCCGTGCTGGACTCCGACGGCTCCTTCTTCCTC |
| | | TACAGCAAGCTCACCGTGGACAAGAGCAGGTGGCAGCAGGGGAACGTCTTC |
| | | TCATGCTCCGTGATGCATGAGGCTCTGCACAACCACTACACGCAGAAGAGC |
| | | CTCTCCCTGTCTCCGGGTAAATGAGCGGCCGCTCGAGGCCGGCAAGGCCGG |
| | | ATCCCCCGACCTCGACCTCTGGCTAATAAAGGAAATTTATTTTCATTGCAA |
| | | TAGTGTGTTGGAATTTTTTGTGTCTCTCACTCGGAAGGACATATGGGAGGG |
| | | CAAATCATTTGGTCGAGATCCCTCGGAGATCTCTAGCTAGAGGATCGATCC |
| | | CCGCCCCGGACGAACTAAACCTGACTACGACATCTCTGCCCCTTCTTCGCG |
| | | GGGCAGTGCATGTAATCCCTTCAGTTGGTTGGTACAACTTGCCAACTGGGC |
| | | CCTGTTCCACATGTGACACGGGGGGGGACCAAACACAAAGGGGTTCTCTGA |
| | | CTGTAGTTGACATCCTTATAAATGGATGTGCACATTTGCCAACACTGAGTG |
| | | GCTTTCATCCTGGAGCAGACTTTGCAGTCTGTGGACTGCAACACAACATTG |
| | | CCTTTATGTGTAACTCTTGGCTGAAGCTCTTACACCAATGCTGGGGGACAT |
| | | GTACCTCCCAGGGGCCCAGGAAGACTACGGGAGGCTACACCAACGTCAATC |
| | | AGAGGGGCCTGTGTAGCTACCGATAAGCGGACCCTCAAGAGGGCATTAGCA |
| | | ATAGTGTTTATAAGGCCCCCTTGTTAACCCTAAACGGGTAGCATATGCTTC |
| | | CCGGGTAGTAGTATATACTATCCAGACTAACCCTAATTCAATAGCATATGT |
| | | TACCCAACGGGAAGCATATGCTATCGAATTAGGGTTAGTAAAAGGGTCCTA |
| | | AGGAACAGCGATATCTCCCACCCCATGAGCTGTCACGGTTTTATTTACATG |
| | | GGGTCAGGATTCCACGAGGGTAGTGAACCATTTTAGTCACAAGGGCAGTGG |
| | | CTGAAGATCAAGGAGCGGGCAGTGAACTCTCCTGAATCTTCGCCTGCTTCT |
| | | TCATTCTCCTTCGTTTAGCTAATAGAATAACTGCTGAGTTGTGAACAGTAA |
| | | GGTGTATGTGAGGTGCTCGAAAACAAGGTTTCAGGTGACGCCCCCAGAATA |
| | | AAATTTGGACGGGGGGTTCAGTGGTGGCATTGTGCTATGACACCAATATAA |
| | | CCCTCACAAACCCCTTGGGCAATAAATACTAGTGTAGGAATGAAACATTCT |
| | | GAATATCTTTAACAATAGAAATCCATGGGGTGGGGACAAGCCGTAAAGACT |
| | | GGATGTCCATCTCACACGAATTTATGGCTATGGGCAACACATAATCCTAGT |
| | | GCAATATGATACTGGGGTTATTAAGATGTGTCCCAGGCAGGGACCAAGACA |
| | | GGTGAACCATGTTGTTACACTCTATTTGTAACAAGGGGAAAGAGAGTGGAC |
| | | GCCGACAGCAGCGGACTCCACTGGTTGTCTCTAACACCCCCGAAAATTAAA |
| | | CGGGGCTCCACGCCAATGGGGCCCATAAACAAAGACAAGTGGCCACTCTTT |
| | | TTTTTGAAATTGTGGAGTGGGGGCACGCGTCAGCCCCCACACGCCGCCCTG |
| | | CGGTTTTGGACTGTAAAATAAGGGTGTAATAACTTGGCTGATTGTAACCCC |
| | | GCTAACCACTGCGGTCAAACCACTTGCCCACAAAACCACTAATGGCACCCC |
| | | GGGGAATACCTGCATAAGTAGGTGGGCGGGCCAAGATAGGGGCGCGATTGC |
| | | TGCGATCTGGAGGACAAATTACACACACTTGCGCCTGAGCGCCAAGCACAG |
| | | GGTTGTTGGTCCTCATATTCACGAGGTCGCTGAGAGCACGGTGGGCTAATG |
| | | TTGCCATGGGTAGCATATACTACCCAAATATCTGGATAGCATATGCTATCC |
| | | TAATCTATATCTGGGTAGCATAGGCTATCCTAATCTATATCTGGGTAGCAT |
| | | ATGCTATCCTAATCTATATCTGGGTAGTATATGCTATCCTAATTTATATCT |
| | | GGGTAGCATAGGCTATCCTAATCTATATCTGGGTAGCATATGCTATCCTAA |
| | | TCTATATCTGGGTAGTATATGCTATCCTAATCTGTATCCGGGTAGCATATG |
| | | CTATCCTAATAGAGATTAGGGTAGTATATGCTATCCTAATTTATATCTGGG |
| | | TAGCATATACTACCCAAATATCTGGATAGCATATGCTATCCTAATCTATAT |
| | | CTGGGTAGCATATGCTATCCTAATCTATATCTGGGTAGCATAGGCTATCCT |
| | | AATCTATATCTGGGTAGCATATGCTATCCTAATCTATATCTGGGTAGTATA |
| | | TGCTATCCTAATTTATATCTGGGTAGCATAGGCTATCCTAATCTATATCTG |
| | | GGTAGCATATGCTATCCTAATCTATATCTGGGTAGTATATGCTATCCTAAT |
| | | CTGTATCCGGGTAGCATATGCTATCCTCATGATAAGCTGTCAAACATGAGA |
| | | ATTTTCTTGAAGACGAAAGGGCCTCGTGATACGCCTATTTTTATAGGTTAA |
| | | TGTCATGATAATAATGGTTTCTTAGACGTCAGGTGGCACTTTTCGGGGAAA |
| | | TGTGCGCGGAACCCCTATTTGTTTATTTTTCTAAATACATTCAAATATGTA |
| | | TCCGCTCATGAGACAATAACCCTGATAAATGCTTCAATAATATTGAAAAAG |
| | | GAAGAGTATGAGTATTCAACATTTCCGTGTCGCCCTTATTCCCTTTTTTGC |
| | | GGCATTTTGCCTTCCTGTTTTTGCTCACCCAGAAACGCTGGTGAAAGTAAA |
| | | AGATGCTGAAGATCAGTTGGGTGCACGAGTGGGTTACATCGAACTGGATCT |
| | | CAACAGCGGTAAGATCCTTGAGAGTTTTCGCCCCGAAGAACGTTTTCCAAT |
| | | GATGAGCACTTTTAAAGTTCTGCTATGTGGCGCGGTATTATCCCGTGTTGA |
| | | CGCCGGGCAAGAGCAACTCGGTCGCCGCATACACTATTCTCAGAATGACTT |
| | | GGTTGAGTACTCACCAGTCACAGAAAAGCATCTTACGGATGGCATGACAGT |
| | | AAGAGAATTATGCAGTGCTGCCATAACCATGAGTGATAACACTGCGGCCAA |
| | | CTTACTTCTGACAACGATCGGAGGACCGAAGGAGCTAACCGCTTTTTTGCA |
| | | CAACATGGGGGATCATGTAACTCGCCTTGATCGTTGGGAACCGGAGCTGAA |
| | | TGAAGCCATACCAAACGACGAGCGTGACACCACGATGCCTGCAGCAATGGC |
| | | AACAACGTTGCGCAAACTATTAACTGGCGAACTACTTACTCTAGCTTCCCG |
| | | GCAACAATTAATAGACTGGATGGAGGCGGATAAAGTTGCAGGACCACTTCT |
| | | GCGCTCGGCCCTTCCGGCTGGCTGGTTTATTGCTGATAAATCTGGAGCCGG |
| | | TGAGCGTGGGTCTCGCGGTATCATTGCAGCACTGGGGCCAGATGGTAAGCC |
| | | CTCCCGTATCGTAGTTATCTACACGACGGGGAGTCAGGCAACTATGGATGA |
| | | ACGAAATAGACAGATCGCTGAGATAGGTGCCTCACTGATTAAGCATTGGTA |
| | | ACTGTCAGACCAAGTTTACTCATATATACTTTAGATTGATTTAAAACTTCA |
| | | TTTTTAATTTAAAAGGATCTAGGTGAAGATCCTTTTTGATAATCTCATGAC |
| | | CAAAATCCCTTAACGTGAGTTTTCGTTCCACTGAGCGTCAGACCCCGTAGA |
| | | AAAGATCAAAGGATCTTCTTGAGATCCTTTTTTTCTGCGCGTAATCTGCTG |
| | | CTTGCAAACAAAAAAACCACCGCTACCAGCGGTGGTTTGTTTGCCGGATCA |
| | | AGAGCTACCAACTCTTTTTCCGAAGGTAACTGGCTTCAGCAGAGCGCAGAT |
| | | ACCAAATACTGTTCTTCTAGTGTAGCCGTAGTTAGGCCACCACTTCAAGAA |
| | | CTCTGTAGCACCGCCTACATACCTCGCTCTGCTAATCCTGTTACCAGTGGC |
| | | TGCTGCCAGTGGCGATAAGTCGTGTCTTACCGGGTTGGACTCAAGACGATA |
| | | GTTACCGGATAAGGCGCAGCGGTCGGGCTGAACGGGGGGTTCGTGCACACA |
| | | GCCCAGCTTGGAGCGAACGACCTACACCGAACTGAGATACCTACAGCGTGA |
| | | GCTATGAGAAAGCGCCACGCTTCCCGAAGGGAGAAAGGCGGACAGGTATCC |
| | | GGTAAGCGGCAGGGTCGGAACAGGAGAGCGCACGAGGGAGCTTCCAGGGGG |
| | | AAACGCCTGGTATCTTTATAGTCCTGTCGGGTTTCGCCACCTCTGACTTGA |
| | | GCGTCGATTTTTGTGATGCTCGTCAGGGGGGCGGAGCCTATGGAAAAACGC |
| | | CAGCAACGCGGCCTTTTTACGGTTCCTGGCCTTTTGCTGGCCTTTTGCTCA |
| | | CATGTTCTTTCCTGCGTTATCCCCTGATTCTGTGGATAACCGTATTACCGC |
| | | CTTTGAGTGAGCTGATACCGCTCGCCGCAGCCGAACGACCGAGCGCAGCGA |
| | | GTCAGTGAGCGAGGAAGCGGAAGAGCGCCCAATACGCAAACCGCCTCTCCC |
| | | CGCGCGTTGGCCGATTCATTAATGCAGCTGGCACGACAGGTTTCCCGACTG |
| | | GAAAGCGGGCAGTGAGCGCAACGCAATTAATGTGAGTTAGCTCACTCATTA |
| | | GGCACCCCAGGCTTTACACTTTATGCTTCCGGCTCGTATGTTGTGTGGAAT |
| | | TGTGAGCGGATAACAATTTCACACAGGAAACAGCTATGACCATGATTACGC |
| | | CAAGCTCTAGCTAGAGGTCGAGTCCCTCCCCAGCAGGCAGAAGTATGCAAA |
| | | GCATGCATCTCAATTAGTCAGCAACCATAGTCCCGCCCCTAACTCCGCCCA |
| | | TCCCGCCCCTAACTCCGCCCAGTTCCGCCCATTCTCCGCCCCATGGCTGAC |
| | | TAATTTTTTTTATTTATGCAGAGGCCGAGGCCGCCTCGGCCTCTGAGCTAT |
| | | TCCAGAAGTAGTGAGGAGGCTTTTTTGGAGGCCTAGGCTTTTGCAAAAAGC |
| | | TTTGCAAAGATGGATAAAGTTTTAAACAGAGAGGAATCTTTGCAGCTAATG |
| | | GACCTTCTAGGTCTTGAAAGGAGTGGGAATTGGCTCCGGTGCCCGTCAGTG |
| | | GGCAGAGCGCACATCGCCCACAGTCCCCGAGAAGTTGGGGGGAGGGGTCGG |
| | | CAATTGAACCGGTGCCTAGAGAAGGTGGCGCGGGGTAAACTGGGAAAGTGA |
| | | TGTCGTGTACTGGCTCCGCCTTTTTCCCGAGGGTGGGGGAGAACCGTATAT |
| | | AAGTGCAGTAGTCGCCGTGAACGTTCTTTTTCGCAACGGGTTTGCCGCCAG |
| | | AACACAGGTAAGTGCCGTGTGTGGTTCCCGCGGGCCTGGCCTCTTTACGGG |
| | | TTATGGCCCTTGCGTGCCTTGAATTACTTCCACCTGGCTGCAGTACGTGAT |
| | | TCTTGATCCCGAGCTTCGGGTTGGAAGTGGGTGGGAGAGTTCGAGGCCTTG |
| | | CGCTTAAGGAGCCCCTTCGCCTCGTGCTTGAGTTGAGGCCTGGCCTGGGCG |
| | | CTGGGGCCGCCGCGTGCGAATCTGGTGGCACCTTCGCGCCTGTCTCGCTGC |
| | | TTTCGATAAGTCTCTAGCCATTTAAAATTTTTGATGACCTGCTGCGACGCT |
| | | TTTTTTCTGGCAAGATAGTCTTGTAAATGCGGGCCAAGATCTGCACACTGG |
| | | TATTTCGGTTTTTGGGGCCGCGGGCGGCGACGGGGCCCGTGCGTCCCAGCG |
| | | CACATGTTCGGCGAGGCGGGGCCTGCGAGCGCGGCCACCGAGAATCGGACG |
| | | GGGGTAGTCTCAAGCTGGCCGGCCTGCTCTGGTGCCTGGCCTCGCGCCGCC |
| | | GTGTATCGCCCCGCCCTGGGCGGCAAGGCTGGCCCGGTCGGCACCAGTTGC |
| | | GTGAGCGGAAAGATGGCCGCTTCCCGGCCCTGCTGCAGGGAGCTCAAAATG |
| | | GAGGACGCGGCGCTCGGGAGAGCGGGCGGGTGAGTCACCCACACAAAGGAA |
| | | AAGGGCCTTTCCGTCCTCAGCCGTCGCTTCATGTGACTCCACGGAGTACCG |
| | | GGCGCCGTCCAGGCACCTCGATTAGTTCTCGAGCTTTTGGAGTACGTCGTC |
| | | TTTAGGTTGGGGGGAGGGGTTTTATGCGATGGAGTTTCCCCACACTGAGTG |
| | | GGTGGAGACTGAAGTTAGGCCAGCTTGGCACTTGATGTAATTCTCCTTGGA |
| | | ATTTGCCCTTTTTGAGTTTGGATCTTGGTTCATTCTCAAGCCTCAGACAGT |
| | | GGTTCAAAGTTTTTTTCTTCCATTTCAGGTGTCGTGAGGAATTCTCTAGAG |
| | | ATCCCTCGACCTCGAGATCCATTGTGCCCGGGCGCCACCATGGAGTTTGGG |
| | | CTGAGCTGGCTTTTTCTTGTCGCGATTTTAAAAGGTGTCCAGTGC |
| 337 | V2 | ACGGTGGCTGCACCATCTGTCTTCATCTTCCCGCCATCTGATGAGCAGTTG |
| | | AAATCTGGAACTGCCTCTGTTGTGTGCCTGCTGAATAACTTCTATCCCAGA |
| | | GAGGCCAAAGTACAGTGGAAGGTGGATAACGCCCTCCAATCGGGTAACTCC |
| | | CAGGAGAGTGTCACAGAGCAGGACAGCAAGGACAGCACCTACAGCCTCAGC |
| | | AGCACCCTGACGCTGAGCAAAGCAGACTACGAGAAACACAAAGTCTACGCC |
| | | TGCGAAGTCACCCATCAGGGCCTGAGCTCGCCCGTCACAAAGAGCTTCAAC |
| | | AGGGGAGAGTGTTGAGCGGCCGCTCGAGGCCGGCAAGGCCGGATCCCCCGA |
| | | CCTCGACCTCTGGCTAATAAAGGAAATTTATTTTCATTGCAATAGTGTGTT |
| | | GGAATTTTTTGTGTCTCTCACTCGGAAGGACATATGGGAGGGCAAATCATT |
| | | TGGTCGAGATCCCTCGGAGATCTCTAGCTAGAGGATCGATCCCCGCCCCGG |
| | | ACGAACTAAACCTGACTACGACATCTCTGCCCCTTCTTCGCGGGGCAGTGC |
| | | ATGTAATCCCTTCAGTTGGTTGGTACAACTTGCCAACTGGGCCCTGTTCCA |
| | | CATGTGACACGGGGGGGGACCAAACACAAAGGGGTTCTCTGACTGTAGTTG |
| | | ACATCCTTATAAATGGATGTGCACATTTGCCAACACTGAGTGGCTTTCATC |
| | | CTGGAGCAGACTTTGCAGTCTGTGGACTGCAACACAACATTGCCTTTATGT |
| | | GTAACTCTTGGCTGAAGCTCTTACACCAATGCTGGGGGACATGTACCTCCC |
| | | AGGGGCCCAGGAAGACTACGGGAGGCTACACCAACGTCAATCAGAGGGGCC |
| | | TGTGTAGCTACCGATAAGCGGACCCTCAAGAGGGCATTAGCAATAGTGTTT |
| | | ATAAGGCCCCCTTGTTAACCCTAAACGGGTAGCATATGCTTCCCGGGTAGT |
| | | AGTATATACTATCCAGACTAACCCTAATTCAATAGCATATGTTACCCAACG |
| | | GGAAGCATATGCTATCGAATTAGGGTTAGTAAAAGGGTCCTAAGGAACAGC |
| | | GATATCTCCCACCCCATGAGCTGTCACGGTTTTATTTACATGGGGTCAGGA |
| | | TTCCACGAGGGTAGTGAACCATTTTAGTCACAAGGGCAGTGGCTGAAGATC |
| | | AAGGAGCGGGCAGTGAACTCTCCTGAATCTTCGCCTGCTTCTTCATTCTCC |
| | | TTCGTTTAGCTAATAGAATAACTGCTGAGTTGTGAACAGTAAGGTGTATGT |
| | | GAGGTGCTCGAAAACAAGGTTTCAGGTGACGCCCCCAGAATAAAATTTGGA |
| | | CGGGGGGTTCAGTGGTGGCATTGTGCTATGACACCAATATAACCCTCACAA |
| | | ACCCCTTGGGCAATAAATACTAGTGTAGGAATGAAACATTCTGAATATCTT |
| | | TAACAATAGAAATCCATGGGGTGGGGACAAGCCGTAAAGACTGGATGTCCA |
| | | TCTCACACGAATTTATGGCTATGGGCAACACATAATCCTAGTGCAATATGA |
| | | TACTGGGGTTATTAAGATGTGTCCCAGGCAGGGACCAAGACAGGTGAACCA |
| | | TGTTGTTACACTCTATTTGTAACAAGGGGAAAGAGAGTGGACGCCGACAGC |
| | | AGCGGACTCCACTGGTTGTCTCTAACACCCCCGAAAATTAAACGGGGCTCC |
| | | ACGCCAATGGGGCCCATAAACAAAGACAAGTGGCCACTCTTTTTTTTGAAA |
| | | TTGTGGAGTGGGGGCACGCGTCAGCCCCCACACGCCGCCCTGCGGTTTTGG |
| | | ACTGTAAAATAAGGGTGTAATAACTTGGCTGATTGTAACCCCGCTAACCAC |
| | | TGCGGTCAAACCACTTGCCCACAAAACCACTAATGGCACCCCGGGGAATAC |
| | | CTGCATAAGTAGGTGGGCGGGCCAAGATAGGGGCGCGATTGCTGCGATCTG |
| | | GAGGACAAATTACACACACTTGCGCCTGAGCGCCAAGCACAGGGTTGTTGG |
| | | TCCTCATATTCACGAGGTCGCTGAGAGCACGGTGGGCTAATGTTGCCATGG |
| | | GTAGCATATACTACCCAAATATCTGGATAGCATATGCTATCCTAATCTATA |
| | | TCTGGGTAGCATAGGCTATCCTAATCTATATCTGGGTAGCATATGCTATCC |
| | | TAATCTATATCTGGGTAGTATATGCTATCCTAATTTATATCTGGGTAGCAT |
| | | AGGCTATCCTAATCTATATCTGGGTAGCATATGCTATCCTAATCTATATCT |
| | | GGGTAGTATATGCTATCCTAATCTGTATCCGGGTAGCATATGCTATCCTAA |
| | | TAGAGATTAGGGTAGTATATGCTATCCTAATTTATATCTGGGTAGCATATA |
| | | CTACCCAAATATCTGGATAGCATATGCTATCCTAATCTATATCTGGGTAGC |
| | | ATATGCTATCCTAATCTATATCTGGGTAGCATAGGCTATCCTAATCTATAT |
| | | CTGGGTAGCATATGCTATCCTAATCTATATCTGGGTAGTATATGCTATCCT |
| | | AATTTATATCTGGGTAGCATAGGCTATCCTAATCTATATCTGGGTAGCATA |
| | | TGCTATCCTAATCTATATCTGGGTAGTATATGCTATCCTAATCTGTATCCG |
| | | GGTAGCATATGCTATCCTCATGATAAGCTGTCAAACATGAGAATTTTCTTG |
| | | AAGACGAAAGGGCCTCGTGATACGCCTATTTTTATAGGTTAATGTCATGAT |
| | | AATAATGGTTTCTTAGACGTCAGGTGGCACTTTTCGGGGAAATGTGCGCGG |
| | | AACCCCTATTTGTTTATTTTTCTAAATACATTCAAATATGTATCCGCTCAT |
| | | GAGACAATAACCCTGATAAATGCTTCAATAATATTGAAAAAGGAAGAGTAT |
| | | GAGTATTCAACATTTCCGTGTCGCCCTTATTCCCTTTTTTGCGGCATTTTG |
| | | CCTTCCTGTTTTTGCTCACCCAGAAACGCTGGTGAAAGTAAAAGATGCTGA |
| | | AGATCAGTTGGGTGCACGAGTGGGTTACATCGAACTGGATCTCAACAGCGG |
| | | TAAGATCCTTGAGAGTTTTCGCCCCGAAGAACGTTTTCCAATGATGAGCAC |
| | | TTTTAAAGTTCTGCTATGTGGCGCGGTATTATCCCGTGTTGACGCCGGGCA |
| | | AGAGCAACTCGGTCGCCGCATACACTATTCTCAGAATGACTTGGTTGAGTA |
| | | CTCACCAGTCACAGAAAAGCATCTTACGGATGGCATGACAGTAAGAGAATT |
| | | ATGCAGTGCTGCCATAACCATGAGTGATAACACTGCGGCCAACTTACTTCT |
| | | GACAACGATCGGAGGACCGAAGGAGCTAACCGCTTTTTTGCACAACATGGG |
| | | GGATCATGTAACTCGCCTTGATCGTTGGGAACCGGAGCTGAATGAAGCCAT |
| | | ACCAAACGACGAGCGTGACACCACGATGCCTGCAGCAATGGCAACAACGTT |
| | | GCGCAAACTATTAACTGGCGAACTACTTACTCTAGCTTCCCGGCAACAATT |
| | | AATAGACTGGATGGAGGCGGATAAAGTTGCAGGACCACTTCTGCGCTCGGC |
| | | CCTTCCGGCTGGCTGGTTTATTGCTGATAAATCTGGAGCCGGTGAGCGTGG |
| | | GTCTCGCGGTATCATTGCAGCACTGGGGCCAGATGGTAAGCCCTCCCGTAT |
| | | CGTAGTTATCTACACGACGGGGAGTCAGGCAACTATGGATGAACGAAATAG |
| | | ACAGATCGCTGAGATAGGTGCCTCACTGATTAAGCATTGGTAACTGTCAGA |
| | | CCAAGTTTACTCATATATACTTTAGATTGATTTAAAACTTCATTTTTAATT |
| | | TAAAAGGATCTAGGTGAAGATCCTTTTTGATAATCTCATGACCAAAATCCC |
| | | TTAACGTGAGTTTTCGTTCCACTGAGCGTCAGACCCCGTAGAAAAGATCAA |
| | | AGGATCTTCTTGAGATCCTTTTTTTCTGCGCGTAATCTGCTGCTTGCAAAC |
| | | AAAAAAACCACCGCTACCAGCGGTGGTTTGTTTGCCGGATCAAGAGCTACC |
| | | AACTCTTTTTCCGAAGGTAACTGGCTTCAGCAGAGCGCAGATACCAAATAC |
| | | TGTTCTTCTAGTGTAGCCGTAGTTAGGCCACCACTTCAAGAACTCTGTAGC |
| | | ACCGCCTACATACCTCGCTCTGCTAATCCTGTTACCAGTGGCTGCTGCCAG |
| | | TGGCGATAAGTCGTGTCTTACCGGGTTGGACTCAAGACGATAGTTACCGGA |
| | | TAAGGCGCAGCGGTCGGGCTGAACGGGGGGTTCGTGCACACAGCCCAGCTT |
| | | GGAGCGAACGACCTACACCGAACTGAGATACCTACAGCGTGAGCTATGAGA |
| | | AAGCGCCACGCTTCCCGAAGGGAGAAAGGCGGACAGGTATCCGGTAAGCGG |
| | | CAGGGTCGGAACAGGAGAGCGCACGAGGGAGCTTCCAGGGGGAAACGCCTG |
| | | GTATCTTTATAGTCCTGTCGGGTTTCGCCACCTCTGACTTGAGCGTCGATT |
| | | TTTGTGATGCTCGTCAGGGGGGCGGAGCCTATGGAAAAACGCCAGCAACGC |
| | | GGCCTTTTTACGGTTCCTGGCCTTTTGCTGGCCTTTTGCTCACATGTTCTT |
| | | TCCTGCGTTATCCCCTGATTCTGTGGATAACCGTATTACCGCCTTTGAGTG |
| | | AGCTGATACCGCTCGCCGCAGCCGAACGACCGAGCGCAGCGAGTCAGTGAG |
| | | CGAGGAAGCGGAAGAGCGCCCAATACGCAAACCGCCTCTCCCCGCGCGTTG |
| | | GCCGATTCATTAATGCAGCTGGCACGACAGGTTTCCCGACTGGAAAGCGGG |
| | | CAGTGAGCGCAACGCAATTAATGTGAGTTAGCTCACTCATTAGGCACCCCA |
| | | GGCTTTACACTTTATGCTTCCGGCTCGTATGTTGTGTGGAATTGTGAGCGG |
| | | ATAACAATTTCACACAGGAAACAGCTATGACCATGATTACGCCAAGCTCTA |
| | | GCTAGAGGTCGAGTCCCTCCCCAGCAGGCAGAAGTATGCAAAGCATGCATC |
| | | TCAATTAGTCAGCAACCATAGTCCCGCCCCTAACTCCGCCCATCCCGCCCC |
| | | TAACTCCGCCCAGTTCCGCCCATTCTCCGCCCCATGGCTGACTAATTTTTT |
| | | TTATTTATGCAGAGGCCGAGGCCGCCTCGGCCTCTGAGCTATTCCAGAAGT |
| | | AGTGAGGAGGCTTTTTTGGAGGCCTAGGCTTTTGCAAAAAGCTTTGCAAAG |
| | | ATGGATAAAGTTTTAAACAGAGAGGAATCTTTGCAGCTAATGGACCTTCTA |
| | | GGTCTTGAAAGGAGTGGGAATTGGCTCCGGTGCCCGTCAGTGGGCAGAGCG |
| | | CACATCGCCCACAGTCCCCGAGAAGTTGGGGGGAGGGGTCGGCAATTGAAC |
| | | CGGTGCCTAGAGAAGGTGGCGCGGGGTAAACTGGGAAAGTGATGTCGTGTA |
| | | CTGGCTCCGCCTTTTTCCCGAGGGTGGGGGAGAACCGTATATAAGTGCAGT |
| | | AGTCGCCGTGAACGTTCTTTTTCGCAACGGGTTTGCCGCCAGAACACAGGT |
| | | AAGTGCCGTGTGTGGTTCCCGCGGGCCTGGCCTCTTTACGGGTTATGGCCC |
| | | TTGCGTGCCTTGAATTACTTCCACCTGGCTGCAGTACGTGATTCTTGATCC |
| | | CGAGCTTCGGGTTGGAAGTGGGTGGGAGAGTTCGAGGCCTTGCGCTTAAGG |
| | | AGCCCCTTCGCCTCGTGCTTGAGTTGAGGCCTGGCCTGGGCGCTGGGGCCG |
| | | CCGCGTGCGAATCTGGTGGCACCTTCGCGCCTGTCTCGCTGCTTTCGATAA |
| | | GTCTCTAGCCATTTAAAATTTTTGATGACCTGCTGCGACGCTTTTTTTCTG |
| | | GCAAGATAGTCTTGTAAATGCGGGCCAAGATCTGCACACTGGTATTTCGGT |
| | | TTTTGGGGCCGCGGGCGGCGACGGGGCCCGTGCGTCCCAGCGCACATGTTC |
| | | GGCGAGGCGGGGCCTGCGAGCGCGGCCACCGAGAATCGGACGGGGGTAGTC |
| | | TCAAGCTGGCCGGCCTGCTCTGGTGCCTGGCCTCGCGCCGCCGTGTATCGC |
| | | CCCGCCCTGGGCGGCAAGGCTGGCCCGGTCGGCACCAGTTGCGTGAGCGGA |
| | | AAGATGGCCGCTTCCCGGCCCTGCTGCAGGGAGCTCAAAATGGAGGACGCG |
| | | GCGCTCGGGAGAGCGGGCGGGTGAGTCACCCACACAAAGGAAAAGGGCCTT |
| | | TCCGTCCTCAGCCGTCGCTTCATGTGACTCCACGGAGTACCGGGCGCCGTC |
| | | CAGGCACCTCGATTAGTTCTCGAGCTTTTGGAGTACGTCGTCTTTAGGTTG |
| | | GGGGGAGGGGTTTTATGCGATGGAGTTTCCCCACACTGAGTGGGTGGAGAC |
| | | TGAAGTTAGGCCAGCTTGGCACTTGATGTAATTCTCCTTGGAATTTGCCCT |
| | | TTTTGAGTTTGGATCTTGGTTCATTCTCAAGCCTCAGACAGTGGTTCAAAG |
| | | TTTTTTTCTTCCATTTCAGGTGTCGTGAGGAATTCTCTAGAGATCCCTCGA |
| | | CCTCGAGATCCATTGTGCCCGGGCGCACCATGGACATGCGCGTGCCCGCCC |
| | | AGCTGCTGGGCCTGCTGCTGCTGTGGTTCCCCGGCTCGCGATGC |
| 338 | V3 | CAACCCAAGGCTGCCCCCTCGGTCACTCTGTTCCCGCCCTCCTCTGAGGAG |
| | | CTTCAAGCCAACAAGGCCACACTGGTGTGTCTCATAAGTGACTTCTACCCG |
| | | GGAGCCGTGACAGTGGCCTGGAAGGCAGATAGCAGCCCCGTCAAGGCGGGA |
| | | GTGGAGACCACCACACCCTCCAAACAAAGCAACAACAAGTACGCGGCCAGC |
| | | AGCTACCTGAGCCTGACGCCTGAGCAGTGGAAGTCCCACAGAAGCTACAGC |
| | | TGCCAGGTCACGCATGAAGGGAGCACCGTGGAGAAGACAGTGGCCCCTACA |
| | | GAATGTTCATGAGCGGCCGCTCGAGGCCGGCAAGGCCGGATCCCCCGACCT |
| | | CGACCTCTGGCTAATAAAGGAAATTTATTTTCATTGCAATAGTGTGTTGGA |
| | | ATTTTTTGTGTCTCTCACTCGGAAGGACATATGGGAGGGCAAATCATTTGG |
| | | TCGAGATCCCTCGGAGATCTCTAGCTAGAGGATCGATCCCCGCCCCGGACG |
| | | AACTAAACCTGACTACGACATCTCTGCCCCTTCTTCGCGGGGCAGTGCATG |
| | | TAATCCCTTCAGTTGGTTGGTACAACTTGCCAACTGGGCCCTGTTCCACAT |
| | | GTGACACGGGGGGGGACCAAACACAAAGGGGTTCTCTGACTGTAGTTGACA |
| | | TCCTTATAAATGGATGTGCACATTTGCCAACACTGAGTGGCTTTCATCCTG |
| | | GAGCAGACTTTGCAGTCTGTGGACTGCAACACAACATTGCCTTTATGTGTA |
| | | ACTCTTGGCTGAAGCTCTTACACCAATGCTGGGGGACATGTACCTCCCAGG |
| | | GGCCCAGGAAGACTACGGGAGGCTACACCAACGTCAATCAGAGGGGCCTGT |
| | | GTAGCTACCGATAAGCGGACCCTCAAGAGGGCATTAGCAATAGTGTTTATA |
| | | AGGCCCCCTTGTTAACCCTAAACGGGTAGCATATGCTTCCCGGGTAGTAGT |
| | | ATATACTATCCAGACTAACCCTAATTCAATAGCATATGTTACCCAACGGGA |
| | | AGCATATGCTATCGAATTAGGGTTAGTAAAAGGGTCCTAAGGAACAGCGAT |
| | | ATCTCCCACCCCATGAGCTGTCACGGTTTTATTTACATGGGGTCAGGATTC |
| | | CACGAGGGTAGTGAACCATTTTAGTCACAAGGGCAGTGGCTGAAGATCAAG |
| | | GAGCGGGCAGTGAACTCTCCTGAATCTTCGCCTGCTTCTTCATTCTCCTTC |
| | | GTTTAGCTAATAGAATAACTGCTGAGTTGTGAACAGTAAGGTGTATGTGAG |
| | | GTGCTCGAAAACAAGGTTTCAGGTGACGCCCCCAGAATAAAATTTGGACGG |
| | | GGGGTTCAGTGGTGGCATTGTGCTATGACACCAATATAACCCTCACAAACC |
| | | CCTTGGGCAATAAATACTAGTGTAGGAATGAAACATTCTGAATATCTTTAA |
| | | CAATAGAAATCCATGGGGTGGGGACAAGCCGTAAAGACTGGATGTCCATCT |
| | | CACACGAATTTATGGCTATGGGCAACACATAATCCTAGTGCAATATGATAC |
| | | TGGGGTTATTAAGATGTGTCCCAGGCAGGGACCAAGACAGGTGAACCATGT |
| | | TGTTACACTCTATTTGTAACAAGGGGAAAGAGAGTGGACGCCGACAGCAGC |
| | | GGACTCCACTGGTTGTCTCTAACACCCCCGAAAATTAAACGGGGCTCCACG |
| | | CCAATGGGGCCCATAAACAAAGACAAGTGGCCACTCTTTTTTTTGAAATTG |
| | | TGGAGTGGGGGCACGCGTCAGCCCCCACACGCCGCCCTGCGGTTTTGGACT |
| | | GTAAAATAAGGGTGTAATAACTTGGCTGATTGTAACCCCGCTAACCACTGC |
| | | GGTCAAACCACTTGCCCACAAAACCACTAATGGCACCCCGGGGAATACCTG |
| | | CATAAGTAGGTGGGCGGGCCAAGATAGGGGCGCGATTGCTGCGATCTGGAG |
| | | GACAAATTACACACACTTGCGCCTGAGCGCCAAGCACAGGGTTGTTGGTCC |
| | | TCATATTCACGAGGTCGCTGAGAGCACGGTGGGCTAATGTTGCCATGGGTA |
| | | GCATATACTACCCAAATATCTGGATAGCATATGCTATCCTAATCTATATCT |
| | | GGGTAGCATAGGCTATCCTAATCTATATCTGGGTAGCATATGCTATCCTAA |
| | | TCTATATCTGGGTAGTATATGCTATCCTAATTTATATCTGGGTAGCATAGG |
| | | CTATCCTAATCTATATCTGGGTAGCATATGCTATCCTAATCTATATCTGGG |
| | | TAGTATATGCTATCCTAATCTGTATCCGGGTAGCATATGCTATCCTAATAG |
| | | AGATTAGGGTAGTATATGCTATCCTAATTTATATCTGGGTAGCATATACTA |
| | | CCCAAATATCTGGATAGCATATGCTATCCTAATCTATATCTGGGTAGCATA |
| | | TGCTATCCTAATCTATATCTGGGTAGCATAGGCTATCCTAATCTATATCTG |
| | | GGTAGCATATGCTATCCTAATCTATATCTGGGTAGTATATGCTATCCTAAT |
| | | TTATATCTGGGTAGCATAGGCTATCCTAATCTATATCTGGGTAGCATATGC |
| | | TATCCTAATCTATATCTGGGTAGTATATGCTATCCTAATCTGTATCCGGGT |
| | | AGCATATGCTATCCTCATGATAAGCTGTCAAACATGAGAATTTTCTTGAAG |
| | | ACGAAAGGGCCTCGTGATACGCCTATTTTTATAGGTTAATGTCATGATAAT |
| | | AATGGTTTCTTAGACGTCAGGTGGCACTTTTCGGGGAAATGTGCGCGGAAC |
| | | CCCTATTTGTTTATTTTTCTAAATACATTCAAATATGTATCCGCTCATGAG |
| | | ACAATAACCCTGATAAATGCTTCAATAATATTGAAAAAGGAAGAGTATGAG |
| | | TATTCAACATTTCCGTGTCGCCCTTATTCCCTTTTTTGCGGCATTTTGCCT |
| | | TCCTGTTTTTGCTCACCCAGAAACGCTGGTGAAAGTAAAAGATGCTGAAGA |
| | | TCAGTTGGGTGCACGAGTGGGTTACATCGAACTGGATCTCAACAGCGGTAA |
| | | GATCCTTGAGAGTTTTCGCCCCGAAGAACGTTTTCCAATGATGAGCACTTT |
| | | TAAAGTTCTGCTATGTGGCGCGGTATTATCCCGTGTTGACGCCGGGCAAGA |
| | | GCAACTCGGTCGCCGCATACACTATTCTCAGAATGACTTGGTTGAGTACTC |
| | | ACCAGTCACAGAAAAGCATCTTACGGATGGCATGACAGTAAGAGAATTATG |
| | | CAGTGCTGCCATAACCATGAGTGATAACACTGCGGCCAACTTACTTCTGAC |
| | | AACGATCGGAGGACCGAAGGAGCTAACCGCTTTTTTGCACAACATGGGGGA |
| | | TCATGTAACTCGCCTTGATCGTTGGGAACCGGAGCTGAATGAAGCCATACC |
| | | AAACGACGAGCGTGACACCACGATGCCTGCAGCAATGGCAACAACGTTGCG |
| | | CAAACTATTAACTGGCGAACTACTTACTCTAGCTTCCCGGCAACAATTAAT |
| | | AGACTGGATGGAGGCGGATAAAGTTGCAGGACCACTTCTGCGCTCGGCCCT |
| | | TCCGGCTGGCTGGTTTATTGCTGATAAATCTGGAGCCGGTGAGCGTGGGTC |
| | | TCGCGGTATCATTGCAGCACTGGGGCCAGATGGTAAGCCCTCCCGTATCGT |
| | | AGTTATCTACACGACGGGGAGTCAGGCAACTATGGATGAACGAAATAGACA |
| | | GATCGCTGAGATAGGTGCCTCACTGATTAAGCATTGGTAACTGTCAGACCA |
| | | AGTTTACTCATATATACTTTAGATTGATTTAAAACTTCATTTTTAATTTAA |
| | | AAGGATCTAGGTGAAGATCCTTTTTGATAATCTCATGACCAAAATCCCTTA |
| | | ACGTGAGTTTTCGTTCCACTGAGCGTCAGACCCCGTAGAAAAGATCAAAGG |
| | | ATCTTCTTGAGATCCTTTTTTTCTGCGCGTAATCTGCTGCTTGCAAACAAA |
| | | AAAACCACCGCTACCAGCGGTGGTTTGTTTGCCGGATCAAGAGCTACCAAC |
| | | TCTTTTTCCGAAGGTAACTGGCTTCAGCAGAGCGCAGATACCAAATACTGT |
| | | TCTTCTAGTGTAGCCGTAGTTAGGCCACCACTTCAAGAACTCTGTAGCACC |
| | | GCCTACATACCTCGCTCTGCTAATCCTGTTACCAGTGGCTGCTGCCAGTGG |
| | | CGATAAGTCGTGTCTTACCGGGTTGGACTCAAGACGATAGTTACCGGATAA |
| | | GGCGCAGCGGTCGGGCTGAACGGGGGGTTCGTGCACACAGCCCAGCTTGGA |
| | | GCGAACGACCTACACCGAACTGAGATACCTACAGCGTGAGCTATGAGAAAG |
| | | CGCCACGCTTCCCGAAGGGAGAAAGGCGGACAGGTATCCGGTAAGCGGCAG |
| | | GGTCGGAACAGGAGAGCGCACGAGGGAGCTTCCAGGGGGAAACGCCTGGTA |
| | | TCTTTATAGTCCTGTCGGGTTTCGCCACCTCTGACTTGAGCGTCGATTTTT |
| | | GTGATGCTCGTCAGGGGGGCGGAGCCTATGGAAAAACGCCAGCAACGCGGC |
| | | CTTTTTACGGTTCCTGGCCTTTTGCTGGCCTTTTGCTCACATGTTCTTTCC |
| | | TGCGTTATCCCCTGATTCTGTGGATAACCGTATTACCGCCTTTGAGTGAGC |
| | | TGATACCGCTCGCCGCAGCCGAACGACCGAGCGCAGCGAGTCAGTGAGCGA |
| | | GGAAGCGGAAGAGCGCCCAATACGCAAACCGCCTCTCCCCGCGCGTTGGCC |
| | | GATTCATTAATGCAGCTGGCACGACAGGTTTCCCGACTGGAAAGCGGGCAG |
| | | TGAGCGCAACGCAATTAATGTGAGTTAGCTCACTCATTAGGCACCCCAGGC |
| | | TTTACACTTTATGCTTCCGGCTCGTATGTTGTGTGGAATTGTGAGCGGATA |
| | | ACAATTTCACACAGGAAACAGCTATGACCATGATTACGCCAAGCTCTAGCT |
| | | AGAGGTCGAGTCCCTCCCCAGCAGGCAGAAGTATGCAAAGCATGCATCTCA |
| | | ATTAGTCAGCAACCATAGTCCCGCCCCTAACTCCGCCCATCCCGCCCCTAA |
| | | CTCCGCCCAGTTCCGCCCATTCTCCGCCCCATGGCTGACTAATTTTTTTTA |
| | | TTTATGCAGAGGCCGAGGCCGCCTCGGCCTCTGAGCTATTCCAGAAGTAGT |
| | | GAGGAGGCTTTTTTGGAGGCCTAGGCTTTTGCAAAAAGCTTTGCAAAGATG |
| | | GATAAAGTTTTAAACAGAGAGGAATCTTTGCAGCTAATGGACCTTCTAGGT |
| | | CTTGAAAGGAGTGGGAATTGGCTCCGGTGCCCGTCAGTGGGCAGAGCGCAC |
| | | ATCGCCCACAGTCCCCGAGAAGTTGGGGGGAGGGGTCGGCAATTGAACCGG |
| | | TGCCTAGAGAAGGTGGCGCGGGGTAAACTGGGAAAGTGATGTCGTGTACTG |
| | | GCTCCGCCTTTTTCCCGAGGGTGGGGGAGAACCGTATATAAGTGCAGTAGT |
| | | CGCCGTGAACGTTCTTTTTCGCAACGGGTTTGCCGCCAGAACACAGGTAAG |
| | | TGCCGTGTGTGGTTCCCGCGGGCCTGGCCTCTTTACGGGTTATGGCCCTTG |
| | | CGTGCCTTGAATTACTTCCACCTGGCTGCAGTACGTGATTCTTGATCCCGA |
| | | GCTTCGGGTTGGAAGTGGGTGGGAGAGTTCGAGGCCTTGCGCTTAAGGAGC |
| | | CCCTTCGCCTCGTGCTTGAGTTGAGGCCTGGCCTGGGCGCTGGGGCCGCCG |
| | | CGTGCGAATCTGGTGGCACCTTCGCGCCTGTCTCGCTGCTTTCGATAAGTC |
| | | TCTAGCCATTTAAAATTTTTGATGACCTGCTGCGACGCTTTTTTTCTGGCA |
| | | AGATAGTCTTGTAAATGCGGGCCAAGATCTGCACACTGGTATTTCGGTTTT |
| | | TGGGGCCGCGGGCGGCGACGGGGCCCGTGCGTCCCAGCGCACATGTTCGGC |
| | | GAGGCGGGGCCTGCGAGCGCGGCCACCGAGAATCGGACGGGGGTAGTCTCA |
| | | AGCTGGCCGGCCTGCTCTGGTGCCTGGCCTCGCGCCGCCGTGTATCGCCCC |
| | | GCCCTGGGCGGCAAGGCTGGCCCGGTCGGCACCAGTTGCGTGAGCGGAAAG |
| | | ATGGCCGCTTCCCGGCCCTGCTGCAGGGAGCTCAAAATGGAGGACGCGGCG |
| | | CTCGGGAGAGCGGGCGGGTGAGTCACCCACACAAAGGAAAAGGGCCTTTCC |
| | | GTCCTCAGCCGTCGCTTCATGTGACTCCACGGAGTACCGGGCGCCGTCCAG |
| | | GCACCTCGATTAGTTCTCGAGCTTTTGGAGTACGTCGTCTTTAGGTTGGGG |
| | | GGAGGGGTTTTATGCGATGGAGTTTCCCCACACTGAGTGGGTGGAGACTGA |
| | | AGTTAGGCCAGCTTGGCACTTGATGTAATTCTCCTTGGAATTTGCCCTTTT |
| | | TGAGTTTGGATCTTGGTTCATTCTCAAGCCTCAGACAGTGGTTCAAAGTTT |
| | | TTTTCTTCCATTTCAGGTGTCGTGAGGAATTCTCTAGAGATCCCTCGACCT |
| | | CGAGATCCATTGTGCCCGGGCGCCACCATGACTTGGACCCCACTCCTCTTC |
| | | CTCACCCTCCTCCTCCACTGCACAGGAAGCTTATCG |
| 339 | V4 | ACGGTGGCTGCACCATCTGTCTTCATCTTCCCGCCATCTGATGAGCAGTTG |
| | | AAATCTGGAACTGCCTCTGTTGTGTGCCTGCTGAATAACTTCTATCCCAGA |
| | | GAGGCCAAAGTACAGTGGAAGGTGGATAACGCCCTCCAATCGGGTAACTCC |
| | | CAGGAGAGTGTCACAGAGCAGGACAGCAAGGACAGCACCTACAGCCTCAGC |
| | | AGCACCCTGACGCTGAGCAAAGCAGACTACGAGAAACACAAAGTCTACGCC |
| | | TGCGAAGTCACCCATCAGGGCCTGAGCTCGCCCGTCACAAAGAGCTTCAAC |
| | | AGGGGAGAGTGTTGAGCGGCCGCTCGAGGCCGGCAAGGCCGGATCCCCCGA |
| | | CCTCGACCTCTGGCTAATAAAGGAAATTTATTTTCATTGCAATAGTGTGTT |
| | | GGAATTTTTTGTGTCTCTCACTCGGAAGGACATATGGGAGGGCAAATCATT |
| | | TGGTCGAGATCCCTCGGAGATCTCTAGCTAGAGGATCGATCCCCGCCCCGG |
| | | ACGAACTAAACCTGACTACGACATCTCTGCCCCTTCTTCGCGGGGCAGTGC |
| | | ATGTAATCCCTTCAGTTGGTTGGTACAACTTGCCAACTGGGCCCTGTTCCA |
| | | CATGTGACACGGGGGGGGACCAAACACAAAGGGGTTCTCTGACTGTAGTTG |
| | | ACATCCTTATAAATGGATGTGCACATTTGCCAACACTGAGTGGCTTTCATC |
| | | CTGGAGCAGACTTTGCAGTCTGTGGACTGCAACACAACATTGCCTTTATGT |
| | | GTAACTCTTGGCTGAAGCTCTTACACCAATGCTGGGGGACATGTACCTCCC |
| | | AGGGGCCCAGGAAGACTACGGGAGGCTACACCAACGTCAATCAGAGGGGCC |
| | | TGTGTAGCTACCGATAAGCGGACCCTCAAGAGGGCATTAGCAATAGTGTTT |
| | | ATAAGGCCCCCTTGTTAACCCTAAACGGGTAGCATATGCTTCCCGGGTAGT |
| | | AGTATATACTATCCAGACTAACCCTAATTCAATAGCATATGTTACCCAACG |
| | | GGAAGCATATGCTATCGAATTAGGGTTAGTAAAAGGGTCCTAAGGAACAGC |
| | | GATATCTCCCACCCCATGAGCTGTCACGGTTTTATTTACATGGGGTCAGGA |
| | | TTCCACGAGGGTAGTGAACCATTTTAGTCACAAGGGCAGTGGCTGAAGATC |
| | | AAGGAGCGGGCAGTGAACTCTCCTGAATCTTCGCCTGCTTCTTCATTCTCC |
| | | TTCGTTTAGCTAATAGAATAACTGCTGAGTTGTGAACAGTAAGGTGTATGT |
| | | GAGGTGCTCGAAAACAAGGTTTCAGGTGACGCCCCCAGAATAAAATTTGGA |
| | | CGGGGGGTTCAGTGGTGGCATTGTGCTATGACACCAATATAACCCTCACAA |
| | | ACCCCTTGGGCAATAAATACTAGTGTAGGAATGAAACATTCTGAATATCTT |
| | | TAACAATAGAAATCCATGGGGTGGGGACAAGCCGTAAAGACTGGATGTCCA |
| | | TCTCACACGAATTTATGGCTATGGGCAACACATAATCCTAGTGCAATATGA |
| | | TACTGGGGTTATTAAGATGTGTCCCAGGCAGGGACCAAGACAGGTGAACCA |
| | | TGTTGTTACACTCTATTTGTAACAAGGGGAAAGAGAGTGGACGCCGACAGC |
| | | AGCGGACTCCACTGGTTGTCTCTAACACCCCCGAAAATTAAACGGGGCTCC |
| | | ACGCCAATGGGGCCCATAAACAAAGACAAGTGGCCACTCTTTTTTTTGAAA |
| | | TTGTGGAGTGGGGGCACGCGTCAGCCCCCACACGCCGCCCTGCGGTTTTGG |
| | | ACTGTAAAATAAGGGTGTAATAACTTGGCTGATTGTAACCCCGCTAACCAC |
| | | TGCGGTCAAACCACTTGCCCACAAAACCACTAATGGCACCCCGGGGAATAC |
| | | CTGCATAAGTAGGTGGGCGGGCCAAGATAGGGGCGCGATTGCTGCGATCTG |
| | | GAGGACAAATTACACACACTTGCGCCTGAGCGCCAAGCACAGGGTTGTTGG |
| | | TCCTCATATTCACGAGGTCGCTGAGAGCACGGTGGGCTAATGTTGCCATGG |
| | | GTAGCATATACTACCCAAATATCTGGATAGCATATGCTATCCTAATCTATA |
| | | TCTGGGTAGCATAGGCTATCCTAATCTATATCTGGGTAGCATATGCTATCC |
| | | TAATCTATATCTGGGTAGTATATGCTATCCTAATTTATATCTGGGTAGCAT |
| | | AGGCTATCCTAATCTATATCTGGGTAGCATATGCTATCCTAATCTATATCT |
| | | GGGTAGTATATGCTATCCTAATCTGTATCCGGGTAGCATATGCTATCCTAA |
| | | TAGAGATTAGGGTAGTATATGCTATCCTAATTTATATCTGGGTAGCATATA |
| | | CTACCCAAATATCTGGATAGCATATGCTATCCTAATCTATATCTGGGTAGC |
| | | ATATGCTATCCTAATCTATATCTGGGTAGCATAGGCTATCCTAATCTATAT |
| | | CTGGGTAGCATATGCTATCCTAATCTATATCTGGGTAGTATATGCTATCCT |
| | | AATTTATATCTGGGTAGCATAGGCTATCCTAATCTATATCTGGGTAGCATA |
| | | TGCTATCCTAATCTATATCTGGGTAGTATATGCTATCCTAATCTGTATCCG |
| | | GGTAGCATATGCTATCCTCATGATAAGCTGTCAAACATGAGAATTTTCTTG |
| | | AAGACGAAAGGGCCTCGTGATACGCCTATTTTTATAGGTTAATGTCATGAT |
| | | AATAATGGTTTCTTAGACGTCAGGTGGCACTTTTCGGGGAAATGTGCGCGG |
| | | AACCCCTATTTGTTTATTTTTCTAAATACATTCAAATATGTATCCGCTCAT |
| | | GAGACAATAACCCTGATAAATGCTTCAATAATATTGAAAAAGGAAGAGTAT |
| | | GAGTATTCAACATTTCCGTGTCGCCCTTATTCCCTTTTTTGCGGCATTTTG |
| | | CCTTCCTGTTTTTGCTCACCCAGAAACGCTGGTGAAAGTAAAAGATGCTGA |
| | | AGATCAGTTGGGTGCACGAGTGGGTTACATCGAACTGGATCTCAACAGCGG |
| | | TAAGATCCTTGAGAGTTTTCGCCCCGAAGAACGTTTTCCAATGATGAGCAC |
| | | TTTTAAAGTTCTGCTATGTGGCGCGGTATTATCCCGTGTTGACGCCGGGCA |
| | | AGAGCAACTCGGTCGCCGCATACACTATTCTCAGAATGACTTGGTTGAGTA |
| | | CTCACCAGTCACAGAAAAGCATCTTACGGATGGCATGACAGTAAGAGAATT |
| | | ATGCAGTGCTGCCATAACCATGAGTGATAACACTGCGGCCAACTTACTTCT |
| | | GACAACGATCGGAGGACCGAAGGAGCTAACCGCTTTTTTGCACAACATGGG |
| | | GGATCATGTAACTCGCCTTGATCGTTGGGAACCGGAGCTGAATGAAGCCAT |
| | | ACCAAACGACGAGCGTGACACCACGATGCCTGCAGCAATGGCAACAACGTT |
| | | GCGCAAACTATTAACTGGCGAACTACTTACTCTAGCTTCCCGGCAACAATT |
| | | AATAGACTGGATGGAGGCGGATAAAGTTGCAGGACCACTTCTGCGCTCGGC |
| | | CCTTCCGGCTGGCTGGTTTATTGCTGATAAATCTGGAGCCGGTGAGCGTGG |
| | | GTCTCGCGGTATCATTGCAGCACTGGGGCCAGATGGTAAGCCCTCCCGTAT |
| | | CGTAGTTATCTACACGACGGGGAGTCAGGCAACTATGGATGAACGAAATAG |
| | | ACAGATCGCTGAGATAGGTGCCTCACTGATTAAGCATTGGTAACTGTCAGA |
| | | CCAAGTTTACTCATATATACTTTAGATTGATTTAAAACTTCATTTTTAATT |
| | | TAAAAGGATCTAGGTGAAGATCCTTTTTGATAATCTCATGACCAAAATCCC |
| | | TTAACGTGAGTTTTCGTTCCACTGAGCGTCAGACCCCGTAGAAAAGATCAA |
| | | AGGATCTTCTTGAGATCCTTTTTTTCTGCGCGTAATCTGCTGCTTGCAAAC |
| | | AAAAAAACCACCGCTACCAGCGGTGGTTTGTTTGCCGGATCAAGAGCTACC |
| | | AACTCTTTTTCCGAAGGTAACTGGCTTCAGCAGAGCGCAGATACCAAATAC |
| | | TGTTCTTCTAGTGTAGCCGTAGTTAGGCCACCACTTCAAGAACTCTGTAGC |
| | | ACCGCCTACATACCTCGCTCTGCTAATCCTGTTACCAGTGGCTGCTGCCAG |
| | | TGGCGATAAGTCGTGTCTTACCGGGTTGGACTCAAGACGATAGTTACCGGA |
| | | TAAGGCGCAGCGGTCGGGCTGAACGGGGGGTTCGTGCACACAGCCCAGCTT |
| | | GGAGCGAACGACCTACACCGAACTGAGATACCTACAGCGTGAGCTATGAGA |
| | | AAGCGCCACGCTTCCCGAAGGGAGAAAGGCGGACAGGTATCCGGTAAGCGG |
| | | CAGGGTCGGAACAGGAGAGCGCACGAGGGAGCTTCCAGGGGGAAACGCCTG |
| | | GTATCTTTATAGTCCTGTCGGGTTTCGCCACCTCTGACTTGAGCGTCGATT |
| | | TTTGTGATGCTCGTCAGGGGGGCGGAGCCTATGGAAAAACGCCAGCAACGC |
| | | GGCCTTTTTACGGTTCCTGGCCTTTTGCTGGCCTTTTGCTCACATGTTCTT |
| | | TCCTGCGTTATCCCCTGATTCTGTGGATAACCGTATTACCGCCTTTGAGTG |
| | | AGCTGATACCGCTCGCCGCAGCCGAACGACCGAGCGCAGCGAGTCAGTGAG |
| | | CGAGGAAGCGGAAGAGCGCCCAATACGCAAACCGCCTCTCCCCGCGCGTTG |
| | | GCCGATTCATTAATGCAGCTGGCACGACAGGTTTCCCGACTGGAAAGCGGG |
| | | CAGTGAGCGCAACGCAATTAATGTGAGTTAGCTCACTCATTAGGCACCCCA |
| | | GGCTTTACACTTTATGCTTCCGGCTCGTATGTTGTGTGGAATTGTGAGCGG |
| | | ATAACAATTTCACACAGGAAACAGCTATGACCATGATTACGCCAAGCTCTA |
| | | GCTAGAGGTCGAGTCCCTCCCCAGCAGGCAGAAGTATGCAAAGCATGCATC |
| | | TCAATTAGTCAGCAACCATAGTCCCGCCCCTAACTCCGCCCATCCCGCCCC |
| | | TAACTCCGCCCAGTTCCGCCCATTCTCCGCCCCATGGCTGACTAATTTTTT |
| | | TTATTTATGCAGAGGCCGAGGCCGCCTCGGCCTCTGAGCTATTCCAGAAGT |
| | | AGTGAGGAGGCTTTTTTGGAGGCCTAGGCTTTTGCAAAAAGCTTTGCAAAG |
| | | ATGGATAAAGTTTTAAACAGAGAGGAATCTTTGCAGCTAATGGACCTTCTA |
| | | GGTCTTGAAAGGAGTGGGAATTGGCTCCGGTGCCCGTCAGTGGGCAGAGCG |
| | | CACATCGCCCACAGTCCCCGAGAAGTTGGGGGGAGGGGTCGGCAATTGAAC |
| | | CGGTGCCTAGAGAAGGTGGCGCGGGGTAAACTGGGAAAGTGATGTCGTGTA |
| | | CTGGCTCCGCCTTTTTCCCGAGGGTGGGGGAGAACCGTATATAAGTGCAGT |
| | | AGTCGCCGTGAACGTTCTTTTTCGCAACGGGTTTGCCGCCAGAACACAGGT |
| | | AAGTGCCGTGTGTGGTTCCCGCGGGCCTGGCCTCTTTACGGGTTATGGCCC |
| | | TTGCGTGCCTTGAATTACTTCCACCTGGCTGCAGTACGTGATTCTTGATCC |
| | | CGAGCTTCGGGTTGGAAGTGGGTGGGAGAGTTCGAGGCCTTGCGCTTAAGG |
| | | AGCCCCTTCGCCTCGTGCTTGAGTTGAGGCCTGGCCTGGGCGCTGGGGCCG |
| | | CCGCGTGCGAATCTGGTGGCACCTTCGCGCCTGTCTCGCTGCTTTCGATAA |
| | | GTCTCTAGCCATTTAAAATTTTTGATGACCTGCTGCGACGCTTTTTTTCTG |
| | | GCAAGATAGTCTTGTAAATGCGGGCCAAGATCTGCACACTGGTATTTCGGT |
| | | TTTTGGGGCCGCGGGCGGCGACGGGGCCCGTGCGTCCCAGCGCACATGTTC |
| | | GGCGAGGCGGGGCCTGCGAGCGCGGCCACCGAGAATCGGACGGGGGTAGTC |
| | | TCAAGCTGGCCGGCCTGCTCTGGTGCCTGGCCTCGCGCCGCCGTGTATCGC |
| | | CCCGCCCTGGGCGGCAAGGCTGGCCCGGTCGGCACCAGTTGCGTGAGCGGA |
| | | AAGATGGCCGCTTCCCGGCCCTGCTGCAGGGAGCTCAAAATGGAGGACGCG |
| | | GCGCTCGGGAGAGCGGGCGGGTGAGTCACCCACACAAAGGAAAAGGGCCTT |
| | | TCCGTCCTCAGCCGTCGCTTCATGTGACTCCACGGAGTACCGGGCGCCGTC |
| | | CAGGCACCTCGATTAGTTCTCGAGCTTTTGGAGTACGTCGTCTTTAGGTTG |
| | | GGGGGAGGGGTTTTATGCGATGGAGTTTCCCCACACTGAGTGGGTGGAGAC |
| | | TGAAGTTAGGCCAGCTTGGCACTTGATGTAATTCTCCTTGGAATTTGCCCT |
| | | TTTTGAGTTTGGATCTTGGTTCATTCTCAAGCCTCAGACAGTGGTTCAAAG |
| | | TTTTTTTCTTCCATTTCAGGTGTCGTGAGGAATTCTCTAGAGATCCCTCGA |
| | | CCTCGAGATCCATTGTGCCCGGGCGCACCATGACTTGGACCCCACTCCTCT |
| | | TCCTCACCCTCCTCCTCCACTGCACAGGAAGCTTATCG |
| 340 | V5 | CAACCCAAGGCTGCCCCCTCGGTCACTCTGTTCCCGCCCTCCTCTGAGGAG |
| | | CTTCAAGCCAACAAGGCCACACTGGTGTGTCTCATAAGTGACTTCTACCCG |
| | | GGAGCCGTGACAGTGGCCTGGAAGGCAGATAGCAGCCCCGTCAAGGCGGGA |
| | | GTGGAGACCACCACACCCTCCAAACAAAGCAACAACAAGTACGCGGCCAGC |
| | | AGCTACCTGAGCCTGACGCCTGAGCAGTGGAAGTCCCACAGAAGCTACAGC |
| | | TGCCAGGTCACGCATGAAGGGAGCACCGTGGAGAAGACAGTGGCCCCTACA |
| | | GAATGTTCATGAGCGGCCGCTCGAGGCCGGCAAGGCCGGATCCCCCGACCT |
| | | CGACCTCTGGCTAATAAAGGAAATTTATTTTCATTGCAATAGTGTGTTGGA |
| | | ATTTTTTGTGTCTCTCACTCGGAAGGACATATGGGAGGGCAAATCATTTGG |
| | | TCGAGATCCCTCGGAGATCTCTAGCTAGAGGATCGATCCCCGCCCCGGACG |
| | | AACTAAACCTGACTACGACATCTCTGCCCCTTCTTCGCGGGGCAGTGCATG |
| | | TAATCCCTTCAGTTGGTTGGTACAACTTGCCAACTGGGCCCTGTTCCACAT |
| | | GTGACACGGGGGGGGACCAAACACAAAGGGGTTCTCTGACTGTAGTTGACA |
| | | TCCTTATAAATGGATGTGCACATTTGCCAACACTGAGTGGCTTTCATCCTG |
| | | GAGCAGACTTTGCAGTCTGTGGACTGCAACACAACATTGCCTTTATGTGTA |
| | | ACTCTTGGCTGAAGCTCTTACACCAATGCTGGGGGACATGTACCTCCCAGG |
| | | GGCCCAGGAAGACTACGGGAGGCTACACCAACGTCAATCAGAGGGGCCTGT |
| | | GTAGCTACCGATAAGCGGACCCTCAAGAGGGCATTAGCAATAGTGTTTATA |
| | | AGGCCCCCTTGTTAACCCTAAACGGGTAGCATATGCTTCCCGGGTAGTAGT |
| | | ATATACTATCCAGACTAACCCTAATTCAATAGCATATGTTACCCAACGGGA |
| | | AGCATATGCTATCGAATTAGGGTTAGTAAAAGGGTCCTAAGGAACAGCGAT |
| | | ATCTCCCACCCCATGAGCTGTCACGGTTTTATTTACATGGGGTCAGGATTC |
| | | CACGAGGGTAGTGAACCATTTTAGTCACAAGGGCAGTGGCTGAAGATCAAG |
| | | GAGCGGGCAGTGAACTCTCCTGAATCTTCGCCTGCTTCTTCATTCTCCTTC |
| | | GTTTAGCTAATAGAATAACTGCTGAGTTGTGAACAGTAAGGTGTATGTGAG |
| | | GTGCTCGAAAACAAGGTTTCAGGTGACGCCCCCAGAATAAAATTTGGACGG |
| | | GGGGTTCAGTGGTGGCATTGTGCTATGACACCAATATAACCCTCACAAACC |
| | | CCTTGGGCAATAAATACTAGTGTAGGAATGAAACATTCTGAATATCTTTAA |
| | | CAATAGAAATCCATGGGGTGGGGACAAGCCGTAAAGACTGGATGTCCATCT |
| | | CACACGAATTTATGGCTATGGGCAACACATAATCCTAGTGCAATATGATAC |
| | | TGGGGTTATTAAGATGTGTCCCAGGCAGGGACCAAGACAGGTGAACCATGT |
| | | TGTTACACTCTATTTGTAACAAGGGGAAAGAGAGTGGACGCCGACAGCAGC |
| | | GGACTCCACTGGTTGTCTCTAACACCCCCGAAAATTAAACGGGGCTCCACG |
| | | CCAATGGGGCCCATAAACAAAGACAAGTGGCCACTCTTTTTTTTGAAATTG |
| | | TGGAGTGGGGGCACGCGTCAGCCCCCACACGCCGCCCTGCGGTTTTGGACT |
| | | GTAAAATAAGGGTGTAATAACTTGGCTGATTGTAACCCCGCTAACCACTGC |
| | | GGTCAAACCACTTGCCCACAAAACCACTAATGGCACCCCGGGGAATACCTG |
| | | CATAAGTAGGTGGGCGGGCCAAGATAGGGGCGCGATTGCTGCGATCTGGAG |
| | | GACAAATTACACACACTTGCGCCTGAGCGCCAAGCACAGGGTTGTTGGTCC |
| | | TCATATTCACGAGGTCGCTGAGAGCACGGTGGGCTAATGTTGCCATGGGTA |
| | | GCATATACTACCCAAATATCTGGATAGCATATGCTATCCTAATCTATATCT |
| | | GGGTAGCATAGGCTATCCTAATCTATATCTGGGTAGCATATGCTATCCTAA |
| | | TCTATATCTGGGTAGTATATGCTATCCTAATTTATATCTGGGTAGCATAGG |
| | | CTATCCTAATCTATATCTGGGTAGCATATGCTATCCTAATCTATATCTGGG |
| | | TAGTATATGCTATCCTAATCTGTATCCGGGTAGCATATGCTATCCTAATAG |
| | | AGATTAGGGTAGTATATGCTATCCTAATTTATATCTGGGTAGCATATACTA |
| | | CCCAAATATCTGGATAGCATATGCTATCCTAATCTATATCTGGGTAGCATA |
| | | TGCTATCCTAATCTATATCTGGGTAGCATAGGCTATCCTAATCTATATCTG |
| | | GGTAGCATATGCTATCCTAATCTATATCTGGGTAGTATATGCTATCCTAAT |
| | | TTATATCTGGGTAGCATAGGCTATCCTAATCTATATCTGGGTAGCATATGC |
| | | TATCCTAATCTATATCTGGGTAGTATATGCTATCCTAATCTGTATCCGGGT |
| | | AGCATATGCTATCCTCATGATAAGCTGTCAAACATGAGAATTTTCTTGAAG |
| | | ACGAAAGGGCCTCGTGATACGCCTATTTTTATAGGTTAATGTCATGATAAT |
| | | AATGGTTTCTTAGACGTCAGGTGGCACTTTTCGGGGAAATGTGCGCGGAAC |
| | | CCCTATTTGTTTATTTTTCTAAATACATTCAAATATGTATCCGCTCATGAG |
| | | ACAATAACCCTGATAAATGCTTCAATAATATTGAAAAAGGAAGAGTATGAG |
| | | TATTCAACATTTCCGTGTCGCCCTTATTCCCTTTTTTGCGGCATTTTGCCT |
| | | TCCTGTTTTTGCTCACCCAGAAACGCTGGTGAAAGTAAAAGATGCTGAAGA |
| | | TCAGTTGGGTGCACGAGTGGGTTACATCGAACTGGATCTCAACAGCGGTAA |
| | | GATCCTTGAGAGTTTTCGCCCCGAAGAACGTTTTCCAATGATGAGCACTTT |
| | | TAAAGTTCTGCTATGTGGCGCGGTATTATCCCGTGTTGACGCCGGGCAAGA |
| | | GCAACTCGGTCGCCGCATACACTATTCTCAGAATGACTTGGTTGAGTACTC |
| | | ACCAGTCACAGAAAAGCATCTTACGGATGGCATGACAGTAAGAGAATTATG |
| | | CAGTGCTGCCATAACCATGAGTGATAACACTGCGGCCAACTTACTTCTGAC |
| | | AACGATCGGAGGACCGAAGGAGCTAACCGCTTTTTTGCACAACATGGGGGA |
| | | TCATGTAACTCGCCTTGATCGTTGGGAACCGGAGCTGAATGAAGCCATACC |
| | | AAACGACGAGCGTGACACCACGATGCCTGCAGCAATGGCAACAACGTTGCG |
| | | CAAACTATTAACTGGCGAACTACTTACTCTAGCTTCCCGGCAACAATTAAT |
| | | AGACTGGATGGAGGCGGATAAAGTTGCAGGACCACTTCTGCGCTCGGCCCT |
| | | TCCGGCTGGCTGGTTTATTGCTGATAAATCTGGAGCCGGTGAGCGTGGGTC |
| | | TCGCGGTATCATTGCAGCACTGGGGCCAGATGGTAAGCCCTCCCGTATCGT |
| | | AGTTATCTACACGACGGGGAGTCAGGCAACTATGGATGAACGAAATAGACA |
| | | GATCGCTGAGATAGGTGCCTCACTGATTAAGCATTGGTAACTGTCAGACCA |
| | | AGTTTACTCATATATACTTTAGATTGATTTAAAACTTCATTTTTAATTTAA |
| | | AAGGATCTAGGTGAAGATCCTTTTTGATAATCTCATGACCAAAATCCCTTA |
| | | ACGTGAGTTTTCGTTCCACTGAGCGTCAGACCCCGTAGAAAAGATCAAAGG |
| | | ATCTTCTTGAGATCCTTTTTTTCTGCGCGTAATCTGCTGCTTGCAAACAAA |
| | | AAAACCACCGCTACCAGCGGTGGTTTGTTTGCCGGATCAAGAGCTACCAAC |
| | | TCTTTTTCCGAAGGTAACTGGCTTCAGCAGAGCGCAGATACCAAATACTGT |
| | | TCTTCTAGTGTAGCCGTAGTTAGGCCACCACTTCAAGAACTCTGTAGCACC |
| | | GCCTACATACCTCGCTCTGCTAATCCTGTTACCAGTGGCTGCTGCCAGTGG |
| | | CGATAAGTCGTGTCTTACCGGGTTGGACTCAAGACGATAGTTACCGGATAA |
| | | GGCGCAGCGGTCGGGCTGAACGGGGGGTTCGTGCACACAGCCCAGCTTGGA |
| | | GCGAACGACCTACACCGAACTGAGATACCTACAGCGTGAGCTATGAGAAAG |
| | | CGCCACGCTTCCCGAAGGGAGAAAGGCGGACAGGTATCCGGTAAGCGGCAG |
| | | GGTCGGAACAGGAGAGCGCACGAGGGAGCTTCCAGGGGGAAACGCCTGGTA |
| | | TCTTTATAGTCCTGTCGGGTTTCGCCACCTCTGACTTGAGCGTCGATTTTT |
| | | GTGATGCTCGTCAGGGGGGCGGAGCCTATGGAAAAACGCCAGCAACGCGGC |
| | | CTTTTTACGGTTCCTGGCCTTTTGCTGGCCTTTTGCTCACATGTTCTTTCC |
| | | TGCGTTATCCCCTGATTCTGTGGATAACCGTATTACCGCCTTTGAGTGAGC |
| | | TGATACCGCTCGCCGCAGCCGAACGACCGAGCGCAGCGAGTCAGTGAGCGA |
| | | GGAAGCGGAAGAGCGCCCAATACGCAAACCGCCTCTCCCCGCGCGTTGGCC |
| | | GATTCATTAATGCAGCTGGCACGACAGGTTTCCCGACTGGAAAGCGGGCAG |
| | | TGAGCGCAACGCAATTAATGTGAGTTAGCTCACTCATTAGGCACCCCAGGC |
| | | TTTACACTTTATGCTTCCGGCTCGTATGTTGTGTGGAATTGTGAGCGGATA |
| | | ACAATTTCACACAGGAAACAGCTATGACCATGATTACGCCAAGCTCTAGCT |
| | | AGAGGTCGAGTCCCTCCCCAGCAGGCAGAAGTATGCAAAGCATGCATCTCA |
| | | ATTAGTCAGCAACCATAGTCCCGCCCCTAACTCCGCCCATCCCGCCCCTAA |
| | | CTCCGCCCAGTTCCGCCCATTCTCCGCCCCATGGCTGACTAATTTTTTTTA |
| | | TTTATGCAGAGGCCGAGGCCGCCTCGGCCTCTGAGCTATTCCAGAAGTAGT |
| | | GAGGAGGCTTTTTTGGAGGCCTAGGCTTTTGCAAAAAGCTTTGCAAAGATG |
| | | GATAAAGTTTTAAACAGAGAGGAATCTTTGCAGCTAATGGACCTTCTAGGT |
| | | CTTGAAAGGAGTGGGAATTGGCTCCGGTGCCCGTCAGTGGGCAGAGCGCAC |
| | | ATCGCCCACAGTCCCCGAGAAGTTGGGGGGAGGGGTCGGCAATTGAACCGG |
| | | TGCCTAGAGAAGGTGGCGCGGGGTAAACTGGGAAAGTGATGTCGTGTACTG |
| | | GCTCCGCCTTTTTCCCGAGGGTGGGGGAGAACCGTATATAAGTGCAGTAGT |
| | | CGCCGTGAACGTTCTTTTTCGCAACGGGTTTGCCGCCAGAACACAGGTAAG |
| | | TGCCGTGTGTGGTTCCCGCGGGCCTGGCCTCTTTACGGGTTATGGCCCTTG |
| | | CGTGCCTTGAATTACTTCCACCTGGCTGCAGTACGTGATTCTTGATCCCGA |
| | | GCTTCGGGTTGGAAGTGGGTGGGAGAGTTCGAGGCCTTGCGCTTAAGGAGC |
| | | CCCTTCGCCTCGTGCTTGAGTTGAGGCCTGGCCTGGGCGCTGGGGCCGCCG |
| | | CGTGCGAATCTGGTGGCACCTTCGCGCCTGTCTCGCTGCTTTCGATAAGTC |
| | | TCTAGCCATTTAAAATTTTTGATGACCTGCTGCGACGCTTTTTTTCTGGCA |
| | | AGATAGTCTTGTAAATGCGGGCCAAGATCTGCACACTGGTATTTCGGTTTT |
| | | TGGGGCCGCGGGCGGCGACGGGGCCCGTGCGTCCCAGCGCACATGTTCGGC |
| | | GAGGCGGGGCCTGCGAGCGCGGCCACCGAGAATCGGACGGGGGTAGTCTCA |
| | | AGCTGGCCGGCCTGCTCTGGTGCCTGGCCTCGCGCCGCCGTGTATCGCCCC |
| | | GCCCTGGGCGGCAAGGCTGGCCCGGTCGGCACCAGTTGCGTGAGCGGAAAG |
| | | ATGGCCGCTTCCCGGCCCTGCTGCAGGGAGCTCAAAATGGAGGACGCGGCG |
| | | CTCGGGAGAGCGGGCGGGTGAGTCACCCACACAAAGGAAAAGGGCCTTTCC |
| | | GTCCTCAGCCGTCGCTTCATGTGACTCCACGGAGTACCGGGCGCCGTCCAG |
| | | GCACCTCGATTAGTTCTCGAGCTTTTGGAGTACGTCGTCTTTAGGTTGGGG |
| | | GGAGGGGTTTTATGCGATGGAGTTTCCCCACACTGAGTGGGTGGAGACTGA |
| | | AGTTAGGCCAGCTTGGCACTTGATGTAATTCTCCTTGGAATTTGCCCTTTT |
| | | TGAGTTTGGATCTTGGTTCATTCTCAAGCCTCAGACAGTGGTTCAAAGTTT |
| | | TTTTCTTCCATTTCAGGTGTCGTGAGGAATTCTCTAGAGATCCCTCGACCT |
| | | CGAGATCCATTGTGCCCGGGCGCCACCATGGACATGCGCGTGCCCGCCCAG |
| | | CTGCTGGGCCTGCTGCTGCTGTGGTTCCCCGGCTCGCGATGC |
| 341 | V7 | GCGTCGACCAAGGGCCCATCGGTCTTCCCCCTGGCACCCTCCTCCAAGAGC |
| | | ACCTCTGGGGGCACAGCGGCCCTGGGCTGCCTGGTCAAGGACTACTTCCCC |
| | | GAACCGGTGACGGTGTCGTGGAACTCAGGCGCCCTGACCAGCGGCGTGCAC |
| | | ACCTTCCCGGCTGTCCTACAGTCCTCAGGACTCTACTCCCTCAGCAGCGTG |
| | | GTGACCGTGCCCTCCAGCAGCTTGGGCACCCAGACCTACATCTGCAACGTG |
| | | AATCACAAGCCCAGCAACACCAAGGTGGACAAGAAAGTTGAGCCCAAATCT |
| | | TGTGACAAAACTCACACATGCCCACCGTGCCCAGCACCTGAAGCCGCGGGG |
| | | GGACCGTCAGTCTTCCTCTTCCCCCCAAAACCCAAGGACACCCTCATGATC |
| | | TCCCGGACCCCTGAGGTCACATGCGTGGTGGTGGACGTGAGCCACGAAGAC |
| | | CCTGAGGTCAAGTTCAACTGGTACGTGGACGGCGTGGAGGTGCATAATGCC |
| | | AAGACAAAGCCGCGGGAGGAGCAGTACAACAGCACGTACCGTGTGGTCAGC |
| | | GTCCTCACCGTCCTGCACCAGGACTGGCTGAATGGCAAGGAGTACAAGTGC |
| | | AAGGTCTCCAACAAAGCCCTCCCAGCCCCCATCGAGAAAACCATCTCCAAA |
| | | GCCAAAGGGCAGCCCCGAGAACCACAGGTGTACACCCTGCCCCCATCCCGC |
| | | GAGGAGATGACCAAGAACCAGGTCAGCCTGACCTGCCTGGTCAAAGGCTTC |
| | | TATCCCAGCGACATCGCCGTGGAGTGGGAGAGCAATGGGCAGCCGGAGAAC |
| | | AACTACAAGACCACGCCTCCCGTGCTGGACTCCGACGGCTCCTTCTTCCTC |
| | | TACAGCAAGCTCACCGTGGACAAGAGCAGGTGGCAGCAGGGGAACGTCTTC |
| | | TCATGCTCCGTGATGCATGAGGCTCTGCACAACCACTACACGCAGAAGAGC |
| | | CTCTCCCTGTCTCCGGGTAAATGAGCGGCCGCTCGAGGCCGGCAAGGCCGG |
| | | ATCCCCCGACCTCGACCTCTGGCTAATAAAGGAAATTTATTTTCATTGCAA |
| | | TAGTGTGTTGGAATTTTTTGTGTCTCTCACTCGGAAGGACATATGGGAGGG |
| | | CAAATCATTTGGTCGAGATCCCTCGGAGATCTCTAGCTAGAGGATCGATCC |
| | | CCGCCCCGGACGAACTAAACCTGACTACGACATCTCTGCCCCTTCTTCGCG |
| | | GGGCAGTGCATGTAATCCCTTCAGTTGGTTGGTACAACTTGCCAACTGGGC |
| | | CCTGTTCCACATGTGACACGGGGGGGGACCAAACACAAAGGGGTTCTCTGA |
| | | CTGTAGTTGACATCCTTATAAATGGATGTGCACATTTGCCAACACTGAGTG |
| | | GCTTTCATCCTGGAGCAGACTTTGCAGTCTGTGGACTGCAACACAACATTG |
| | | CCTTTATGTGTAACTCTTGGCTGAAGCTCTTACACCAATGCTGGGGGACAT |
| | | GTACCTCCCAGGGGCCCAGGAAGACTACGGGAGGCTACACCAACGTCAATC |
| | | AGAGGGGCCTGTGTAGCTACCGATAAGCGGACCCTCAAGAGGGCATTAGCA |
| | | ATAGTGTTTATAAGGCCCCCTTGTTAACCCTAAACGGGTAGCATATGCTTC |
| | | CCGGGTAGTAGTATATACTATCCAGACTAACCCTAATTCAATAGCATATGT |
| | | TACCCAACGGGAAGCATATGCTATCGAATTAGGGTTAGTAAAAGGGTCCTA |
| | | AGGAACAGCGATATCTCCCACCCCATGAGCTGTCACGGTTTTATTTACATG |
| | | GGGTCAGGATTCCACGAGGGTAGTGAACCATTTTAGTCACAAGGGCAGTGG |
| | | CTGAAGATCAAGGAGCGGGCAGTGAACTCTCCTGAATCTTCGCCTGCTTCT |
| | | TCATTCTCCTTCGTTTAGCTAATAGAATAACTGCTGAGTTGTGAACAGTAA |
| | | GGTGTATGTGAGGTGCTCGAAAACAAGGTTTCAGGTGACGCCCCCAGAATA |
| | | AAATTTGGACGGGGGGTTCAGTGGTGGCATTGTGCTATGACACCAATATAA |
| | | CCCTCACAAACCCCTTGGGCAATAAATACTAGTGTAGGAATGAAACATTCT |
| | | GAATATCTTTAACAATAGAAATCCATGGGGTGGGGACAAGCCGTAAAGACT |
| | | GGATGTCCATCTCACACGAATTTATGGCTATGGGCAACACATAATCCTAGT |
| | | GCAATATGATACTGGGGTTATTAAGATGTGTCCCAGGCAGGGACCAAGACA |
| | | GGTGAACCATGTTGTTACACTCTATTTGTAACAAGGGGAAAGAGAGTGGAC |
| | | GCCGACAGCAGCGGACTCCACTGGTTGTCTCTAACACCCCCGAAAATTAAA |
| | | CGGGGCTCCACGCCAATGGGGCCCATAAACAAAGACAAGTGGCCACTCTTT |
| | | TTTTTGAAATTGTGGAGTGGGGGCACGCGTCAGCCCCCACACGCCGCCCTG |
| | | CGGTTTTGGACTGTAAAATAAGGGTGTAATAACTTGGCTGATTGTAACCCC |
| | | GCTAACCACTGCGGTCAAACCACTTGCCCACAAAACCACTAATGGCACCCC |
| | | GGGGAATACCTGCATAAGTAGGTGGGCGGGCCAAGATAGGGGCGCGATTGC |
| | | TGCGATCTGGAGGACAAATTACACACACTTGCGCCTGAGCGCCAAGCACAG |
| | | GGTTGTTGGTCCTCATATTCACGAGGTCGCTGAGAGCACGGTGGGCTAATG |
| | | TTGCCATGGGTAGCATATACTACCCAAATATCTGGATAGCATATGCTATCC |
| | | TAATCTATATCTGGGTAGCATAGGCTATCCTAATCTATATCTGGGTAGCAT |
| | | ATGCTATCCTAATCTATATCTGGGTAGTATATGCTATCCTAATTTATATCT |
| | | GGGTAGCATAGGCTATCCTAATCTATATCTGGGTAGCATATGCTATCCTAA |
| | | TCTATATCTGGGTAGTATATGCTATCCTAATCTGTATCCGGGTAGCATATG |
| | | CTATCCTAATAGAGATTAGGGTAGTATATGCTATCCTAATTTATATCTGGG |
| | | TAGCATATACTACCCAAATATCTGGATAGCATATGCTATCCTAATCTATAT |
| | | CTGGGTAGCATATGCTATCCTAATCTATATCTGGGTAGCATAGGCTATCCT |
| | | AATCTATATCTGGGTAGCATATGCTATCCTAATCTATATCTGGGTAGTATA |
| | | TGCTATCCTAATTTATATCTGGGTAGCATAGGCTATCCTAATCTATATCTG |
| | | GGTAGCATATGCTATCCTAATCTATATCTGGGTAGTATATGCTATCCTAAT |
| | | CTGTATCCGGGTAGCATATGCTATCCTCATGATAAGCTGTCAAACATGAGA |
| | | ATTTTCTTGAAGACGAAAGGGCCTCGTGATACGCCTATTTTTATAGGTTAA |
| | | TGTCATGATAATAATGGTTTCTTAGACGTCAGGTGGCACTTTTCGGGGAAA |
| | | TGTGCGCGGAACCCCTATTTGTTTATTTTTCTAAATACATTCAAATATGTA |
| | | TCCGCTCATGAGACAATAACCCTGATAAATGCTTCAATAATATTGAAAAAG |
| | | GAAGAGTATGAGTATTCAACATTTCCGTGTCGCCCTTATTCCCTTTTTTGC |
| | | GGCATTTTGCCTTCCTGTTTTTGCTCACCCAGAAACGCTGGTGAAAGTAAA |
| | | AGATGCTGAAGATCAGTTGGGTGCACGAGTGGGTTACATCGAACTGGATCT |
| | | CAACAGCGGTAAGATCCTTGAGAGTTTTCGCCCCGAAGAACGTTTTCCAAT |
| | | GATGAGCACTTTTAAAGTTCTGCTATGTGGCGCGGTATTATCCCGTGTTGA |
| | | CGCCGGGCAAGAGCAACTCGGTCGCCGCATACACTATTCTCAGAATGACTT |
| | | GGTTGAGTACTCACCAGTCACAGAAAAGCATCTTACGGATGGCATGACAGT |
| | | AAGAGAATTATGCAGTGCTGCCATAACCATGAGTGATAACACTGCGGCCAA |
| | | CTTACTTCTGACAACGATCGGAGGACCGAAGGAGCTAACCGCTTTTTTGCA |
| | | CAACATGGGGGATCATGTAACTCGCCTTGATCGTTGGGAACCGGAGCTGAA |
| | | TGAAGCCATACCAAACGACGAGCGTGACACCACGATGCCTGCAGCAATGGC |
| | | AACAACGTTGCGCAAACTATTAACTGGCGAACTACTTACTCTAGCTTCCCG |
| | | GCAACAATTAATAGACTGGATGGAGGCGGATAAAGTTGCAGGACCACTTCT |
| | | GCGCTCGGCCCTTCCGGCTGGCTGGTTTATTGCTGATAAATCTGGAGCCGG |
| | | TGAGCGTGGGTCTCGCGGTATCATTGCAGCACTGGGGCCAGATGGTAAGCC |
| | | CTCCCGTATCGTAGTTATCTACACGACGGGGAGTCAGGCAACTATGGATGA |
| | | ACGAAATAGACAGATCGCTGAGATAGGTGCCTCACTGATTAAGCATTGGTA |
| | | ACTGTCAGACCAAGTTTACTCATATATACTTTAGATTGATTTAAAACTTCA |
| | | TTTTTAATTTAAAAGGATCTAGGTGAAGATCCTTTTTGATAATCTCATGAC |
| | | CAAAATCCCTTAACGTGAGTTTTCGTTCCACTGAGCGTCAGACCCCGTAGA |
| | | AAAGATCAAAGGATCTTCTTGAGATCCTTTTTTTCTGCGCGTAATCTGCTG |
| | | CTTGCAAACAAAAAAACCACCGCTACCAGCGGTGGTTTGTTTGCCGGATCA |
| | | AGAGCTACCAACTCTTTTTCCGAAGGTAACTGGCTTCAGCAGAGCGCAGAT |
| | | ACCAAATACTGTTCTTCTAGTGTAGCCGTAGTTAGGCCACCACTTCAAGAA |
| | | CTCTGTAGCACCGCCTACATACCTCGCTCTGCTAATCCTGTTACCAGTGGC |
| | | TGCTGCCAGTGGCGATAAGTCGTGTCTTACCGGGTTGGACTCAAGACGATA |
| | | GTTACCGGATAAGGCGCAGCGGTCGGGCTGAACGGGGGGTTCGTGCACACA |
| | | GCCCAGCTTGGAGCGAACGACCTACACCGAACTGAGATACCTACAGCGTGA |
| | | GCTATGAGAAAGCGCCACGCTTCCCGAAGGGAGAAAGGCGGACAGGTATCC |
| | | GGTAAGCGGCAGGGTCGGAACAGGAGAGCGCACGAGGGAGCTTCCAGGGGG |
| | | AAACGCCTGGTATCTTTATAGTCCTGTCGGGTTTCGCCACCTCTGACTTGA |
| | | GCGTCGATTTTTGTGATGCTCGTCAGGGGGGCGGAGCCTATGGAAAAACGC |
| | | CAGCAACGCGGCCTTTTTACGGTTCCTGGCCTTTTGCTGGCCTTTTGCTCA |
| | | CATGTTCTTTCCTGCGTTATCCCCTGATTCTGTGGATAACCGTATTACCGC |
| | | CTTTGAGTGAGCTGATACCGCTCGCCGCAGCCGAACGACCGAGCGCAGCGA |
| | | GTCAGTGAGCGAGGAAGCGGAAGAGCGCCCAATACGCAAACCGCCTCTCCC |
| | | CGCGCGTTGGCCGATTCATTAATGCAGCTGGCACGACAGGTTTCCCGACTG |
| | | GAAAGCGGGCAGTGAGCGCAACGCAATTAATGTGAGTTAGCTCACTCATTA |
| | | GGCACCCCAGGCTTTACACTTTATGCTTCCGGCTCGTATGTTGTGTGGAAT |
| | | TGTGAGCGGATAACAATTTCACACAGGAAACAGCTATGACCATGATTACGC |
| | | CAAGCTCTAGCTAGAGGTCGAGTCCCTCCCCAGCAGGCAGAAGTATGCAAA |
| | | GCATGCATCTCAATTAGTCAGCAACCATAGTCCCGCCCCTAACTCCGCCCA |
| | | TCCCGCCCCTAACTCCGCCCAGTTCCGCCCATTCTCCGCCCCATGGCTGAC |
| | | TAATTTTTTTTATTTATGCAGAGGCCGAGGCCGCCTCGGCCTCTGAGCTAT |
| | | TCCAGAAGTAGTGAGGAGGCTTTTTTGGAGGCCTAGGCTTTTGCAAAAAGC |
| | | TTTGCAAAGATGGATAAAGTTTTAAACAGAGAGGAATCTTTGCAGCTAATG |
| | | GACCTTCTAGGTCTTGAAAGGAGTGGGAATTGGCTCCGGTGCCCGTCAGTG |
| | | GGCAGAGCGCACATCGCCCACAGTCCCCGAGAAGTTGGGGGGAGGGGTCGG |
| | | CAATTGAACCGGTGCCTAGAGAAGGTGGCGCGGGGTAAACTGGGAAAGTGA |
| | | TGTCGTGTACTGGCTCCGCCTTTTTCCCGAGGGTGGGGGAGAACCGTATAT |
| | | AAGTGCAGTAGTCGCCGTGAACGTTCTTTTTCGCAACGGGTTTGCCGCCAG |
| | | AACACAGGTAAGTGCCGTGTGTGGTTCCCGCGGGCCTGGCCTCTTTACGGG |
| | | TTATGGCCCTTGCGTGCCTTGAATTACTTCCACCTGGCTGCAGTACGTGAT |
| | | TCTTGATCCCGAGCTTCGGGTTGGAAGTGGGTGGGAGAGTTCGAGGCCTTG |
| | | CGCTTAAGGAGCCCCTTCGCCTCGTGCTTGAGTTGAGGCCTGGCCTGGGCG |
| | | CTGGGGCCGCCGCGTGCGAATCTGGTGGCACCTTCGCGCCTGTCTCGCTGC |
| | | TTTCGATAAGTCTCTAGCCATTTAAAATTTTTGATGACCTGCTGCGACGCT |
| | | TTTTTTCTGGCAAGATAGTCTTGTAAATGCGGGCCAAGATCTGCACACTGG |
| | | TATTTCGGTTTTTGGGGCCGCGGGCGGCGACGGGGCCCGTGCGTCCCAGCG |
| | | CACATGTTCGGCGAGGCGGGGCCTGCGAGCGCGGCCACCGAGAATCGGACG |
| | | GGGGTAGTCTCAAGCTGGCCGGCCTGCTCTGGTGCCTGGCCTCGCGCCGCC |
| | | GTGTATCGCCCCGCCCTGGGCGGCAAGGCTGGCCCGGTCGGCACCAGTTGC |
| | | GTGAGCGGAAAGATGGCCGCTTCCCGGCCCTGCTGCAGGGAGCTCAAAATG |
| | | GAGGACGCGGCGCTCGGGAGAGCGGGCGGGTGAGTCACCCACACAAAGGAA |
| | | AAGGGCCTTTCCGTCCTCAGCCGTCGCTTCATGTGACTCCACGGAGTACCG |
| | | GGCGCCGTCCAGGCACCTCGATTAGTTCTCGAGCTTTTGGAGTACGTCGTC |
| | | TTTAGGTTGGGGGGAGGGGTTTTATGCGATGGAGTTTCCCCACACTGAGTG |
| | | GGTGGAGACTGAAGTTAGGCCAGCTTGGCACTTGATGTAATTCTCCTTGGA |
| | | ATTTGCCCTTTTTGAGTTTGGATCTTGGTTCATTCTCAAGCCTCAGACAGT |
| | | GGTTCAAAGTTTTTTTCTTCCATTTCAGGTGTCGTGAGGAATTCTCTAGAG |
| | | ATCCCTCGACCTCGAGATCCATTGTGCCCGGGCGCCACCATGGAGTTTGGG |
| | | CTGAGCTGGCTTTTTCTTGTCGCGATTTTAAAAGGTGTCCAGTGC |

[0602] The present disclosure incorporates by reference in their entirety techniques well known in the field of molecular biology and drug delivery. These techniques include, but are not limited to, techniques described in the following publications:
[0603] Ausubel et al. (eds.), CURRENT PROTOCOLS IN MOLECULAR BIOLOGY, John Wiley &Sons, NY (1993);
[0604] Ausubel, F. M. et al. eds., SHORT PROTOCOLS IN MOLECULAR BIOLOGY (4th Ed. 1999) John Wiley & Sons, NY. (ISBN 0-471-32938-X).
[0605] CONTROLLED DRUG BIOAVAILABILITY, DRUG PRODUCT DESIGN AND PERFORMANCE, Smolen and Ball (eds.), Wiley, New York (1984);
[0606] Giege, R. and Ducruix, A. Barrett, CRYSTALLIZATION OF NUCLEIC ACIDS AND PROTEINS, a Practical Approach, 2nd ea., pp. 20 1-16, Oxford University Press, New York, N.Y., (1999);
[0607] Goodson, in MEDICAL APPLICATIONS OF CONTROLLED RELEASE, vol. 2, pp. 115-138 (1984);
[0608] Hammerling, et al., in: MONOCLONAL ANTIBODIES AND T-CELL HYBRIDOMAS 563-681 (Elsevier, N.Y., 1981;
[0609] Harlow et al., ANTIBODIES: A LABORATORY MANUAL, (Cold Spring Harbor Laboratory Press, 2nd ed. 1988);
[0610] Kabat et al., SEQUENCES OF PROTEINS OF IMMUNOLOGICAL INTEREST (National Institutes of Health, Bethesda, Md. (1987) and (1991);
[0611] Kabat, E. A., et al. (1991) SEQUENCES OF PROTEINS OF IMMUNOLOGICAL INTEREST, Fifth Edition, U.S. Department of Health and Human Services, NIH Publication No. 91-3242;
[0612] Kontermann and Dubel eds., ANTIBODY ENGINEERING (2001) Springer-Verlag. New York. 790 pp. (ISBN 3-540-41354-5).
[0613] Kriegler, Gene Transfer and Expression, A Laboratory Manual, Stockton Press, NY (1990);
[0614] Lu and Weiner eds., CLONING AND EXPRESSION VECTORS FOR GENE FUNCTION ANALYSIS (2001) BioTechniques Press. Westborough, Mass. 298 pp. (ISBN 1-881299-21-X).
[0615] MEDICAL APPLICATIONS OF CONTROLLED RELEASE, Langer and Wise (eds.), CRC Pres., Boca Raton, Ha. (1974);
[0616] Old, R. W. & S. B. Primrose, PRINCIPLES OF GENE MANIPULATION: AN INTRODUCTION TO GENETIC ENGINEERING (3d Ed. 1985) Blackwell Scientific Publications, Boston. Studies in Microbiology; V.2:409 pp. (ISBN 0-632-01318-4).
[0617] Sambrook, J. et al. eds., MOLECULAR CLONING: A LABORATORY MANUAL (2d Ed. 1989) Cold Spring Harbor Laboratory Press, NY. Vols. 1-3. (ISBN 0-87969-309-6).
[0618] SUSTAINED AND CONTROLLED RELEASE DRUG DELIVERY SYSTEMS, J. R. Robinson, ed., Marcel Dekker, Inc., New York, 1978
[0619] Winnacker, E. L. FROM GENES TO CLONES: INTRODUCTION TO GENE TECHNOLOGY (1987) VCH Publishers, NY (translated by Horst Ibelgaufts). 634 pp. (ISBN 0-89573-614-4).

### Incorporation by Reference

[0620] The contents of all cited references (including literature references, patents, patent applications, and websites) that maybe cited throughout this application are hereby expressly incorporated by reference in their entirety, as are the references cited therein. The practice of the present invention will employ, unless otherwise indicated, conventional techniques of immunology, molecular biology and cell biology, which are well known in the art.

### EQUIVALENTS

[0621] The invention may be embodied in other specific forms without departing from the spirit or essential characteristics thereof. The foregoing embodiments are therefore to be considered in all respects illustrative rather than limiting of the invention described herein. Scope of the invention is thus indicated by the appended claims rather than by the foregoing description, and all changes that come within the meaning and range of equivalency of the claims are therefore intended to be embraced herein.

1. A binding protein capable of binding a pair of antigens comprising a polypeptide chain, wherein said polypeptide chain comprises VD1-(X1)n-VD2-C-(X2)n, wherein;
VD1 is a first heavy chain variable domain;
VD2 is a second heavy chain variable domain;
C is a heavy chain constant domain;
X1 is a linker with the proviso that it is not CH1;
X2 is an Fc region; and
(X1)n is (X1)0 or (X1)1 and (X2)n is (X2)0 or (X2)1;
wherein the pair of antigens is: NGF and MTX; NGF and NKG2D; NGF and IGF1,2; NGF and RON; NGF and ErbB3; NGF and CD-3; NGF and IGFR; NGF and HGF; NGF and VEGF; NGF and DLL4; NGF and P1GF; NGF and CD-20; NGF and EGFR; NGF and HER-2; NGF and CD-19; NGF and CD-80; NGF and CD-22; NGF and CD-40; NGF and c-MET; or NGF and NRP1.

2. (canceled)

3. A binding protein capable of binding a pair of antigens comprising a polypeptide chain, wherein said polypeptide chain comprises VD1-(X1)n-VD2-C-(X2)n, wherein;
VD1 is a first light heavy chain variable domain;
VD2 is a second light heavy chain variable domain;
C is a light chain constant domain;
X1 is a linker with the proviso that it is not CH1 CL;
X2 does not comprise an Fc region; and
(X1)n is (X1)0 or (X1)1 and (X2)n is (X2)0 or (X2)1;
wherein the pair of antigens is: NGF and MTX; NGF and NKG2D; NGF and IGF1,2; NGF and RON; NGF and ErbB3; NGF and CD-3; NGF and IGFR; NGF and HGF; NGF and VEGF; NGF and DLL4; NGF and P1 GF; NGF and CD-20;
NGF and EGFR; NGF and HER-2; NGF and CD-19; NGF and CD-80; NGF and CD-22; NGF and CD-40; NGF and c-MET; or NGF and NRP1.

4-5. (canceled)

6. A binding protein capable of binding a pair of antigens comprising first and second polypeptide chains, wherein said first polypeptide chain comprises a first VD1-(X1)n-VD2-C-(X2)n, wherein
VD1 is a first heavy chain variable domain;
VD2 is a second heavy chain variable domain;
C is a heavy chain constant domain;
X1 is a first linker; and
X2 is an Fc region; and
wherein said second polypeptide chain comprises a second VD1-(X1)n-VD2-C—(X2)n, wherein
VD1 is a first light chain variable domain;
VD2 is a second light chain variable domain;
C is a light chain constant domain;
X1 is a second linker;
X2 does not comprise an Fc region;
wherein (X1)n is (X1)0 or (X1)1 and (X2)n is (X2)0 or (X2)1, wherein the first and second X1 linker are the same or different;
wherein the first X1 linker is not CH1 and/or the second X1 linker is not CL; and
wherein the pair of antigens is: NGF and MTX; NGF and NKG2D; NGF and IGF1,2; NGF and RON; NGF and ErbB3; NGF and CD-3; NGF and IGFR; NGF and HGF; NGF and VEGF; NGF and DLL4; NGF and P1 GF; NGF and CD-20; NGF and EGFR; NGF and HER-2; NGF and CD-19; NGF and CD-80; NGF and CD-22; NGF and CD-40; NGF and c-MET; or NGF and NRP1.

7-23. (canceled)

24. A binding protein capable of binding two antigens comprising four polypeptide chains, wherein two polypeptide chains comprise VD1-(X1)n-VD2-C-(X2)n, wherein VD1 is a first heavy chain variable domain;
VD2 is a second heavy chain variable domain;
C is a heavy chain constant domain;
X1 is a first linker; and
X2 is an Fc region; and
wherein two polypeptide chains comprise VD1-(X1)n-VD2-C-(X2)n, wherein
VD1 is a first light chain variable domain;
VD2 is a second light chain variable domain;
C is a light chain constant domain;
X1 is a second linker;
X2 does not comprise an Fc region;
wherein (X1)n is (X1)0 or (X1)1 and (X2)n is (X2)0 or (X2)1;
wherein the first and second X1 linker are the same or different;
wherein the first X1 linker is not CH1 and/or the second X1 linker is not CL; and
wherein the pair of antigens is: NGF and MTX; NGF and NKG2D; NGF and IGF1,2; NGF and RON; NGF and ErbB3; NGF and CD-3; NGF and IGFR; NGF and HGF; NGF and VEGF; NGF and DLL4; NGF and P1GF; NGF and CD-20; NGF and EGFR; NGF and HER-2; NGF and CD-19; NGF and CD-80; NGF and CD-22; NGF and CD-40; NGF and c-MET; or NGF and NRP1.

25. A binding protein capable of binding two antigens comprising four polypeptide chains, wherein two polypeptide chains comprise VD1-(X1)n-VD2-C-(X2)n, wherein
VD1 is a first heavy chain variable domain;
VD2 is a second heavy chain variable domain;
C is a heavy chain constant domain;
X1 is a first linker;
X2 is an Fc region; and
(X1)n is (X1)0 or (X1)1 and (X2)n is (X2)0 or (X2)1; and
wherein two polypeptide chains comprise VD1-(X1)n-VD2-C-(X2)n, wherein
VD1 is a first light chain variable domain;
VD2 is a second light chain variable domain;
C is a light chain constant domain;
X1 is a second linker;
X2 does not comprise an Fc region; and
(X1)n is (X1)0 or (X1)1 and (X2)n is (X2)0 or (X2)1;
wherein the first and second X1 linker are the same or different;
wherein the first X1 linker is not CH1 and/or the second X1 linker is not CL;
wherein the VD1 and VD2 heavy chain variable domains independently comprise SEQ ID NO: 28, 30, 32, 34, 38, 40, 42, 44, 46, 48, 50, 54, 60, 62, 66, 68, 72, 74, 76, 78, 80, 82, 84, or 86;
wherein the VD1 and VD2 light chain variable domains independently comprise SEQ ID NO: 29, 32, 33, 35, 39, 41, 43, 45, 47, 49, 51, 55, 61, 63, 67, 69, 73, 75, 77, 79, 81, 83, 85, or 87; or
wherein at least one of the antigens is: MTX; NKG2D; RON; or c-MET.

26. The binding protein according to claim 24, wherein said binding protein has an on rate constant (Kon) to said one or more targets of: at least about 10²M⁻¹s⁻¹; at least about 10³M⁻¹s⁻¹; at least about 10⁴M⁻¹s⁻¹; at least about 10⁵M⁻¹s⁻¹; or at least about 10⁶M⁻¹s⁻¹, as measured by surface plasmon resonance;
an off rate constant (Koff) to said one or more targets of: at most about 10⁻³s⁻¹; at most about 10⁻⁴s⁻¹; at most about 10⁻⁵s⁻¹; or at most about 10⁻⁶s⁻¹, as measured by surface plasmon resonance; and/or
a dissociation constant (KD) to said one or more targets s of: at most about 10⁻⁷ M; at most about 10⁻⁸ M; at most about 10⁻⁹ M; at most about 10⁻¹⁰ M; at most about 10⁻¹¹ M; at most about 10⁻¹² M; or at most 10⁻¹³ M.

27-28. (canceled)

29. A binding protein conjugate comprising a binding protein according to claim 24, said binding protein conjugate further comprising an immunoadhesion molecule, an imaging agent, a therapeutic agent, or a cytotoxic agent.

30. The binding protein conjugate according to claim 29, wherein said imaging agent is a radiolabel, an enzyme, a fluorescent label, a luminescent label, a bioluminescent label, a magnetic label, or biotin.

31. The binding protein conjugate according to claim 30, wherein said radiolabel is: ³H, ¹⁴C, ³⁵S, ⁹⁰Y, ⁹⁹Tc, ¹¹¹In, ¹²⁵I, ¹³¹I, ¹⁷⁷Lu, ¹⁶⁶Ho, or ¹⁵³Sm.

32. The binding protein conjugate according to claim 29, wherein said therapeutic or cytotoxic agent is: an anti-metabolite, an alkylating agent, an antibiotic, a growth factor, a cytokine, an anti-angiogenic agent, an anti-mitotic agent, an anthracycline, toxin, or an apoptotic agent.

33. The binding protein according to claim 24, wherein said binding protein is a crystallized binding protein.

34. The binding protein according to claim 33, wherein said crystal is a carrier-free pharmaceutical controlled release crystal.

35. The binding protein according to claim 33, wherein said binding protein has a greater half life in vivo than the soluble counterpart of said binding protein.

36. The binding protein according to claim 33, wherein said binding protein retains biological activity.

37. An isolated nucleic acid encoding a binding protein amino acid sequence according to claim 24.

38. A vector comprising an isolated nucleic acid according to claim 37.

39. (canceled)

40. A host cell comprising a vector according to claim 38.

41-50. (canceled)

51. A method of producing a binding protein, comprising culturing the host cell of claim 40 in culture medium under conditions sufficient to produce the binding protein

52-54. (canceled)

55. A protein produced according to the method of claim 51.

56. A pharmaceutical composition comprising the binding protein of claim 24, and a pharmaceutically acceptable carrier.

57-58. (canceled)

59. A method for treating a subject for a disease or a disorder by administering to the subject the binding protein of claim 24 such that treatment is achieved.

60-61. (canceled)

62. A method for generating a binding protein capable of binding two antigens comprising the steps of
a) obtaining a first parent antibody or antigen binding portion thereof, capable of binding a first antigen;
b) obtaining a second parent antibody or antigen binding portion thereof, capable of binding a second antigen;
c) constructing:
(i) a polypeptide chain, wherein said polypeptide chain comprises VD1-(X1)n-VD2-C-(X2)n, wherein;
VD1 is a first heavy chain variable domain obtained from said first parent antibody or antigen binding fragment thereof;
VD2 is a second heavy chain variable domain obtained from said second parent antibody or antigen binding fragment thereof;
C is a heavy chain constant domain;
X1 is a linker with the proviso that it is not CH1;
X2 is an Fc region; and
(X1)n is (X1)0 or (X1)1 and (X2)n is (X2)0 or (X2)1;
(ii) a polypeptide chain, wherein said polypeptide chain comprises VD1-(X1)n-VD2-C-(X2)n, wherein;
VD1 is a first light chain variable domain obtained from said first parent antibody or antigen binding fragment thereof;
VD2 is a second light chain variable domain obtained from said second parent antibody or antigen binding fragment thereof;
C is a light chain constant domain;
X1 is a linker with the proviso that it is not CL CH1;
X2 does not comprise an Fc region; and
(X1)n is (X1)0 or (X1)1 and (X2)n is (X2)0 or (X2)1;
(iii) first and second polypeptide chains, wherein said first polypeptide chain comprises a first VD1-(X1)n-VD2-C-(X2)n, wherein
VD1 is a first heavy chain variable domain obtained from said first parent antibody or antigen binding fragment thereof;
VD2 is a second heavy chain variable domain obtained from said second parent antibody or antigen binding fragment thereof;
C is a heavy chain constant domain;
X1 is a first linker; and
X2 is an Fc region; and
wherein said second polypeptide chain comprises a second VD1-(X1)n-VD2-C-(X2)n, wherein
VD1 is a first light chain variable domain obtained from said first parent antibody or antigen binding fragment thereof;
VD2 is a second light chain variable domain obtained from said second parent antibody or antigen binding fragment thereof;
C is a light chain constant domain;
X1 is a second linker;
X2 does not comprise an Fc region; and
wherein (X1)n is (X1)0 or (X1)1 and (X2)n is (X2)0 or (X2)1;
wherein the first and second X1 linker are the same or different; and
wherein the first X1 linker is not CH1 and/or the second X1 linker is not CL; or
(iv) four polypeptide chains, wherein two polypeptide chains comprise VD1-(X1)n-VD2-C-(X2)n, wherein
VD1 is a first heavy chain variable domain obtained from said first parent antibody or antigen binding fragment thereof;
VD2 is a second heavy chain variable domain obtained from said second parent antibody or antigen binding fragment thereof;
C is a heavy chain constant domain;
X1 is a first linker; and
X2 is an Fc region; and
wherein two polypeptide chains comprise VD1-(X1)n-VD2-C-(X2)n,
wherein
VD1 is a first light chain variable domain obtained from said first parent antibody or antigen binding fragment thereof;
VD2 is a second light chain variable domain obtained from said second parent antibody or antigen binding fragment thereof;
C is a light chain constant domain;
X1 is a second linker;
X2 does not comprise an Fc region;
wherein (X1)n is (X1)0 or (X1)1 and (X2)n is (X2)0 or (X2)1;
wherein the first and second X1 linker are the same or different;
wherein the first X1 linker is not CH1 and/or the second X1 linker is not CL; and
d) expressing said first, second, third and fourth polypeptide chains such that
a binding protein capable of binding a pair of antigens is generated, wherein the pair of antigens is: NGF and MTX; NGF and NKG2D; NGF and IGF1,2; NGF and RON; NGF and ErbB3; NGF and CD-3; NGF and IGFR; NGF and HGF; NGF and VEGF; NGF and DLL4; NGF and P1 GF; NGF and CD-20; NGF and EGFR; NGF and HER-2; NGF and CD-19; NGF and CD-80; NGF and CD-22; NGF and CD-40; NGF and c-MET; or NGF and NRP1.

63-75. (canceled)

76. A method of determining the presence of at least one antigen or fragment thereof in a test sample by an immunoassay,
wherein the immunoassay comprises contacting the test sample with at least one binding protein and at least one detectable label,
wherein the at least one binding protein comprises the binding protein of claim 24.

77-81. (canceled)

82. A method of determining the amount or concentration of an antigen or fragment thereof in a test sample by an immunoassay,
wherein the immunoassay (a) employs at least one binding protein and at least one detectable label and (b) comprises comparing a signal generated by the detectable label with a control or calibrator comprising the antigen or fragment thereof,
wherein the calibrator is optionally part of a series of calibrators in which each calibrator differs from the other calibrators in the series by the concentration of the antigen or fragment thereof,
and wherein the at least one binding protein comprises the binding protein of claim 24.

83-87. (canceled)

88. A kit for assaying a test sample for the presence, amount, or concentration of an antigen or fragment thereof, said kit comprising (a) instructions for assaying the test sample for the antigen or fragment thereof and (b) at least one binding protein comprising the binding protein of claim 24.

89. The binding protein of claim 24, wherein the VD1 and VD2 heavy chain variable domains independently comprise three CDRs from SEQ ID NO: 28, 30, 32, 34, 36, 38, 40, 42, 44, 46, 48, 50, 52, 54, 56, 58, 60, 62, 64, 66, 68, 70, 72, 74, 76, 78, 80, 82, 84, 86, 88, or 90, and wherein the VD1 and VD2 light chain variable domains independently comprise three CDRs from SEQ ID NO: 29, 31, 33, 35, 37, 39, 41, 43, 45, 47, 49, 51, 53, 55, 57, 59, 61, 63, 65, 67, 69, 71, 73, 75, 77, 79, 81, 83, 85, 87, 89, or 91.

90. (canceled)

91. The binding protein of claim 24, wherein the VD1 and VD2 heavy chain variable domains independently comprise SEQ ID NO: 28, 30, 32, 34, 36, 38, 40, 42, 44, 46, 48, 50, 52, 54, 56, 58, 60, 62, 64, 66, 68, 70, 72, 74, 76, 78, 80, 82, 84, 86, 88, or 90; and wherein the VD1 and VD2 light chain variable domains independently comprise SEQ ID NO: 29, 31, 33, 35, 37, 39, 41, 43, 45, 47, 49, 51, 53, 55, 57, 59, 61, 63, 65, 67, 69, 71, 73, 75, 77, 79, 81, 83, 85, 87, 89, or 91.

92. The binding protein of claim 24, wherein n is 0.

93. The binding protein of claim 24, wherein (X1)n between the first and second light chain variable domains is not CL.

94. The binding protein of claim 24, wherein (X1)n is any one of SEQ ID NOs 1-27.

95. The binding protein of claim 24, wherein the Fc region is a native sequence Fc region.

96. The binding protein of claim 24, wherein the Fc region is a variant sequence Fc region.

97. The binding protein of claim 24, wherein the Fc region is from an IgG1, IgG2, IgG3, IgG4, IgA, IgM, IgE, or IgD.

98. The binding protein according to claim 24, wherein said VD1 and/or VD2 of the first polypeptide chain and said VD1 and/or VD2 of the second polypeptide chain are obtained from a same first and second parent antibody, respectively, or antigen binding portion thereof.

99. The binding protein according to claim 24, wherein said VD1 and/or VD2 of the first polypeptide chain and said VD1 and/or VD2 of the second polypeptide chain are obtained from a different first and second parent antibody, respectively, or antigen binding portion thereof.

100. The binding protein according to claim 99, wherein said first and said second parent antibodies bind different epitopes on the same antigen.

101. The binding protein according to claim 99, wherein said first and said second parent antibodies bind different antigens.

102. The binding protein according to claim 101, wherein said first parent antibody or antigen binding portion thereof, binds said first antigen with a potency and/or affinity different from the potency and/or affinity with which said second parent antibody or antigen binding portion thereof, binds said second antigen.

103. The binding protein of claim 98, wherein said binding protein possesses at least one antibody parameter exhibited by said first parent antibody or antigen binding portion thereof, or said second parent antibody or antigen binding portion thereof, wherein said antibody parameters are antigen specificity, affinity to antigen, potency, biological function, epitope recognition, stability, solubility, production efficiency, immunogenicity, pharmacokinetics, bioavailability, tissue cross reactivity, or orthologous antigen binding.

104. The binding protein of claim 99, wherein said binding protein possesses at least one antibody parameter exhibited by said first parent antibody or antigen binding portion thereof, or said second parent antibody or antigen binding portion thereof, wherein said antibody parameters are antigen specificity, affinity to antigen, potency, biological function, epitope recognition, stability, solubility, production efficiency, immunogenicity, pharmacokinetics, bioavailability, tissue cross reactivity, or orthologous antigen binding.

The application's sequence listing, which the Patent Office published only in electronic form, follows.

SEQUENCE LISTING (341 sequences)

SEQ ID NO: 1 - protein, 16 aa, Artificial Sequence
  Description of Artificial Sequence: Synthetic peptide
AKTTPKLEEGEFSEAR

SEQ ID NO: 2 - protein, 17 aa, Artificial Sequence
  Description of Artificial Sequence: Synthetic peptide
AKTTPKLEEGEFSEARV

SEQ ID NO: 3 - protein, 9 aa, Artificial Sequence
  Description of Artificial Sequence: Synthetic peptide
AKTTPKLGG

SEQ ID NO: 4 - protein, 10 aa, Artificial Sequence
  Description of Artificial Sequence: Synthetic peptide
SAKTTPKLGG

SEQ ID NO: 5 - protein, 6 aa, Artificial Sequence
  Description of Artificial Sequence: Synthetic peptide
SAKTTP

SEQ ID NO: 6 - protein, 6 aa, Artificial Sequence
  Description of Artificial Sequence: Synthetic peptide
RADAAP

SEQ ID NO: 7 - protein, 9 aa, Artificial Sequence
  Description of Artificial Sequence: Synthetic peptide
RADAAPTVS

SEQ ID NO: 8 - protein, 12 aa, Artificial Sequence
  Description of Artificial Sequence: Synthetic peptide
RADAAAAGGPGS

SEQ ID NO: 9 - protein, 27 aa, Artificial Sequence
  Description of Artificial Sequence: Synthetic peptide
RADAAAAGGGGSGGGGSGGGGSGGGGS

SEQ ID NO: 10 - protein, 18 aa, Artificial Sequence
  Description of Artificial Sequence: Synthetic peptide
SAKTTPKLEEGEFSEARV

SEQ ID NO: 11 - protein, 5 aa, Artificial Sequence
  Description of Artificial Sequence: Synthetic peptide
ADAAP

SEQ ID NO: 12 - protein, 12 aa, Artificial Sequence
  Description of Artificial Sequence: Synthetic peptide
ADAAPTVSIFPP

SEQ ID NO: 13 - protein, 5 aa, Artificial Sequence
  Description of Artificial Sequence: Synthetic peptide
TVAAP

SEQ ID NO: 14 - protein, 12 aa, Artificial Sequence
  Description of Artificial Sequence: Synthetic peptide
TVAAPSVFIFPP

SEQ ID NO: 15 - protein, 6 aa, Artificial Sequence
  Description of Artificial Sequence: Synthetic peptide
QPKAAP

SEQ ID NO: 16 - protein, 13 aa, Artificial Sequence
  Description of Artificial Sequence: Synthetic peptide
QPKAAPSVTLFPP

SEQ ID NO: 17 - protein, 6 aa, Artificial Sequence
  Description of Artificial Sequence: Synthetic peptide
AKTTPP

SEQ ID NO: 18 - protein, 13 aa, Artificial Sequence
  Description of Artificial Sequence: Synthetic peptide
AKTTPPSVTPLAP

SEQ ID NO: 19 - protein, 6 aa, Artificial Sequence
  Description of Artificial Sequence: Synthetic peptide
AKTTAP

SEQ ID NO: 20 - protein, 13 aa, Artificial Sequence
  Description of Artificial Sequence: Synthetic peptide
AKTTAPSVYPLAP

SEQ ID NO: 21 - protein, 6 aa, Artificial Sequence
  Description of Artificial Sequence: Synthetic peptide
ASTKGP

SEQ ID NO: 22 - protein, 13 aa, Artificial Sequence
  Description of Artificial Sequence: Synthetic peptide
ASTKGPSVFPLAP

SEQ ID NO: 23 - protein, 15 aa, Artificial Sequence
  Description of Artificial Sequence: Synthetic peptide
GGGGSGGGGSGGGGS

SEQ ID NO: 24 - protein, 15 aa, Artificial Sequence
  Description of Artificial Sequence: Synthetic peptide
GENKVEYAPALMALS

SEQ ID NO: 25 - protein, 15 aa, Artificial Sequence
  Description of Artificial Sequence: Synthetic peptide
GPAKELTPLKEAKVS

SEQ ID NO: 26 - protein, 15 aa, Artificial Sequence
  Description of Artificial Sequence: Synthetic peptide
GHEAAAVMQVQYPAS

SEQ ID NO: 27 - protein, 5 aa, Artificial Sequence
  Description of Artificial Sequence: Synthetic peptide
GGGGS

SEQ ID NO: 28 - protein, 121 aa, Artificial Sequence [sequence omitted]

SEQ ID NO: 29 - protein, 107 aa, Artificial Sequence
  Description of Artificial Sequence: Synthetic polypeptide
QIVLSQSPAILSPSPGEKVTMTCRASSSVSYIHWFQQKPGSSPKPWIYATSNLASGVPVRFSGSGSGTSYSLTISRVEAEDAATYYCQQWTSNPPTFGGGTKLEIKR

SEQ ID NO: 30 - protein, 119 aa, Artificial Sequence [sequence omitted]

SEQ ID NO: 31 - protein, 107 aa, Artificial Sequence
  Description of Artificial Sequence: Synthetic polypeptide
QIVLTQSPAIMSASPGEKVTMTCRASSSVSYMNWYQQKSGTSPKRWIYDTSKVASGVPYRFSGSGSGTSYSLTISSMEAEDAATYYCQQWSSNPLTFGSGTKLEINR

SEQ ID NO: 32 - protein, 119 aa, Artificial Sequence [sequence omitted]

SEQ ID NO: 33 - protein, 108 aa, Artificial Sequence
  Description of Artificial Sequence: Synthetic polypeptide
DIQMTQSPSSLSASVGDRVTITCQASQDISNYLNWYQQKPGKAPKLLIYDASNLETGVPSRFSGSGSGTDFTFTISSLQPEDIATYFCQHFDHLPLAFGGGTKVEIKR

SEQ ID NO: 34 - protein, 120 aa, Artificial Sequence [sequence omitted]

SEQ ID NO: 35 - protein, 108 aa, Artificial Sequence
  Description of Artificial Sequence: Synthetic polypeptide
DIQMTQSPSSLSASVGDRVTITCRASQDVNTAVAWYQQKPGKAPKLLIYSASFLYSGVPSRFSGSRSGTDFTLTISSLQPEDFATYYCQQHYTTPPTFGQGTKVEIKR

SEQ ID NO: 36 - protein, 124 aa, Artificial Sequence
  Description of Artificial Sequence: Synthetic polypeptide
EVQLVQSGGGLVKPGGSLRLSCAASGFTFSSYAMHWVRQAPGKGLEWVAVISYDGSNKYYADSVKGRFTISRDNSKNTLYLQMNSLRAEDTAVYYCARFSGWPNNYYYYGMDVWGQGTTVTVSS

SEQ ID NO: 37 - protein, 114 aa, Artificial Sequence
  Description of Artificial Sequence: Synthetic polypeptide
DVVMTQSPLSLPVTPGEPASISCRSSQSLLHSNGFNYVDWYLQKPGQSPHLLIYFGSYRASGVPDRFSGSGSGTDFTLKISRVEAEDVGVYYCMQALQTPPWTFGQGTKVEIRR

SEQ ID NO: 38 - protein, 124 aa, Artificial Sequence
  Description of Artificial Sequence: Synthetic polypeptide
QVQLQQSGAELVRPGSSVKISCKASGYAFSSYWMNWVKQRPGQGLEWIGQIWPGDGDTNYNGKFKGKATLTADESSSTAYMQLSSLASEDSAVYFCARRETTTVGRYYYAMDYWGQGTSVTVSS

SEQ ID NO: 39 - protein, 112 aa, Artificial Sequence
  Description of Artificial Sequence: Synthetic polypeptide
DILLTQTPASLAVSLGQRATISCKASQSVDYDGDSYLNWYQQIPGQPPKLLIYDASNLVSGIPPRFSGSGSGTDFTLNIHPVEKVDAATYHCQQSTEDPWTFGGGTKLEIKR

SEQ ID NO: 40 - protein, 127 aa, Artificial Sequence [sequence omitted]

SEQ ID NO: 41 - protein, 111 aa, Artificial Sequence
  Description of Artificial Sequence: Synthetic polypeptide
ESALTQPPSVSGAPGQKVTISCTGSTSNIGGYDLHWYQQLPGTAPKLLIYDINKRPSGISDRFSGSKSGTAASLAITGLQTEDEADYYCQSYDSSLNAQVFGGGTRLTVLG

SEQ ID NO: 42 - protein, 116 aa, Artificial Sequence [sequence omitted]

SEQ ID NO: 43 - protein, 113 aa, Artificial Sequence
  Description of Artificial Sequence: Synthetic polypeptide
DIQLTQSPSSLSASVGDRVTMSCKSSQSVLYSANHKNYLAWYQQKPGKAPKLLIYWASTRESGVPSRFSGSGSGTDFTFTISSLQPEDIATYYCHQYLSSWTFGGGTKLEIKR

SEQ ID NO: 44 - protein, 120 aa, Artificial Sequence
  Description of Artificial Sequence: Synthetic polypeptide
QVQLVESGGGVVQPGRSLRLSCAASGFTFSSYGMHWVRQAPGKGLEWVAVISYEESNRYHADSVKGRFTISRDNSKITLYLQMNSLRTEDTAVYYCARDGGIAAPGPDYWGQGTLVTVSS

SEQ ID NO: 45 - protein, 113 aa, Artificial Sequence
  Description of Artificial Sequence: Synthetic polypeptide
DIVMTQSPLSLTVTPGEPASISCRSSQSLLYSNGYNYLDWYLQKPGQSPQVLISLGSNRASGVPDRFSGSGSGTDFTLKISRVEAEDVGVYYCMQARQTPFTFGPGTKVDIRR

SEQ ID NO: 46 - protein, 120 aa, Artificial Sequence
  Description of Artificial Sequence: Synthetic polypeptide
QVQLVQSGAEVKKPGASVKVSCKASGYTFTSYDINWVRQATGQGLEWMGWMNPNSGNTGYAQKFQGRVTMTRNTSISTAYMELSSLRSEDTAVYYCARDPYYYYYGMDVWGQGTTVTVSS

SEQ ID NO: 47 - protein, 112 aa, Artificial Sequence
  Description of Artificial Sequence: Synthetic polypeptide
QSVLTQPPSVSAAPGQKVTISCSGSSSNIENNHVSWYQQLPGTAPKLLIYDNNKRPSGIPDRFSGSKSGTSATLGITGLQTGDEADYYCETWDTSLSAGRVFGGGTKLTVLG

SEQ ID NO: 48 - protein, 125 aa, Artificial Sequence [sequence omitted]

SEQ ID NO: 49 - protein, 108 aa, Artificial Sequence
  Description of Artificial Sequence: Synthetic polypeptide
DIQMTQFPSSLSASVGDRVTITCRASQGIRNDLGWYQQKPGKAPKRLIYAASRLHRGVPSRFSGSGSGTEFTLTISSLQPEDFATYYCLQHNSYPCSFGQGTKLEIKR

SEQ ID NO: 50 - protein, 122 aa, Artificial Sequence
  Description of Artificial Sequence: Synthetic polypeptide
QVQLVESGGGLVKPGGSLRLSCAASGFTFSDYYMSWIRQAPGKGLEWVSYISSSGSTIYYADSVKGRFTISRDNAKNSLYLQMNSLRAEDTAVYYCARDEYNSGWYVLFDYWGQGTLVTVSS

SEQ ID NO: 51 - protein, 108 aa, Artificial Sequence
  Description of Artificial Sequence: Synthetic polypeptide
DIQMTQSPSSVSASVGDRVTITCRASQGISSWLAWYQQKPGKAPNLLIYEASSLQSGVPSRFGGSGSGTDFTLTISSLQPEDFATYYCQQANGFPWTFGQGTKVEIKR

SEQ ID NO: 52 - protein, 121 aa, Artificial Sequence
  Description of Artificial Sequence: Synthetic polypeptide
QVQLQQSGPELVRPGASVKWSCPASGYTFTSYWLHWVKKQRPGQGLEWIGMIDPSNSDTRFNPPNFKDKATLNVDRSSNTAYNLLSSLTSADSAVYYCATYGSYVSPLDYWGQGTSVYVSS

SEQ ID NO: 53 - protein, 114 aa, Artificial Sequence
  Description of Artificial Sequence: Synthetic polypeptide
DIMMSQSPSSLTVSVGEKVTVSCKSSQSLLVTSSQKNYLAWYQQKPQQSPKLLIYWASTRESGVPDRFTGSGSGTDFTLTITSVKADDLAVYYCQQYYAYPWTFGDGTKLEIKR

SEQ ID NO: 54 - protein, 123 aa, Artificial Sequence [sequence omitted]

SEQ ID NO: 55 - protein, 108 aa, Artificial Sequence
  Description of Artificial Sequence: Synthetic polypeptide
DIQMTQSPSSLSASVGDRVTITCSASQDISNYLNWYQQKPGKAPKVLIYFTSSLHSGVPSRFSGSGSGTDFTLTISSLQPEDFATYYCQQYSTVPWTFGQGTKVEIKR

SEQ ID NO: 56 - protein, 118 aa, Artificial Sequence
  Description of Artificial Sequence: Synthetic polypeptide
EVQLVESGGGLVQPGGSLRLSCAASGFTFTDNWISWVRQAPGKGLEWVGYISPNSGFTYYADSVKGRFTISADTSKNTAYLQMNSLRAEDTAVYYCARDNFGGYFDYWGQGTLVTVSS

SEQ ID NO: 57 - protein, 109 aa, Artificial Sequence
  Description of Artificial Sequence: Synthetic polypeptide
DIQMTQSPSSLSASVGDRVTITCRASQDVSTAVAWYQQKPGKAPKLLIYSASFLYSGVPSRFSGSGSGTDFTLTISSLQPEDFATTYYCQQSYTGTVTFGQGTKVEIKR

SEQ ID NO: 58 - protein, 119 aa, Artificial Sequence
  Description of Artificial Sequence: Synthetic polypeptide
EVQLVESGGGLVQPGGSLRLSCAASGFSFSSEPISWVRQAPGKGLEWVSSITGKNGYTYYADSVKGRFTISADTSKNTAYLQMNSLRAEDTAVYYCARWGKKVYGMDVWGQGTLVTVSS

SEQ ID NO: 59 - protein, 108 aa, Artificial Sequence
  Description of Artificial Sequence: Synthetic polypeptide
DIQMTQSPSSLSASVGDRVTITCRASQSISSYLAWYQQKPGKAPKLLIYGASSRASGVPSRFSGSGSGTDFTLTISSLQPEDFATYYCQQYMSVPITFGQGTKVEIKR

SEQ ID NO: 60 - protein, 121 aa, Artificial Sequence [sequence omitted]

SEQ ID NO: 61 - protein, 108 aa, Artificial Sequence
  Description of Artificial Sequence: Synthetic polypeptide
DIQMTQSPSSLSASVGDRVTITCRASQSISNNLNWYQQKPGKAPKLLIYYTSRFHSGVPSRFSGSGSGTDFTFTISSLQPEDIATYYCQQEHTLPYTFGQGTKLEIKR

SEQ ID NO: 62 - protein, 119 aa, Artificial Sequence
  Description of Artificial Sequence: Synthetic polypeptide
QVQLKQSGPGLVQPSQSLSITCTVSGFSLTNYGVHWVRQSPGKGLEWLGVIWSGGNTDYNTPFTSRLSINKDNSKSQVFFKMNSLQSNDTAIYYCARALTYYDYEFAYWGQGTLVTVSA

SEQ ID NO: 63 - protein, 108 aa, Artificial Sequence
  Description of Artificial Sequence: Synthetic polypeptide
DILLTQSPVILSVSPGERVSFSCRASQSIGTNIHWYQQRTNGSPRLLIKYASESISGIPSRFSGSGSGTDFTLSINSVESEDIADYYCQQNNNWPTTFGAGTKLELKR

SEQ ID NO: 64 - protein, 127 aa, Artificial Sequence
  Description of Artificial Sequence: Synthetic polypeptide
QVQLQESGPGLVKPSEILSLTCTVSGGSISSHYWSWVRQPPGKGLEWIGYIYYSGSTNYNPSLKSRVTISVDTSKNQFSLNLSSVTAADTAVYYCARIPNYYDRSGYYPGYWYFDLWGRGTLVTVSS

SEQ ID NO: 65 - protein, 116 aa, Artificial Sequence
  Description of Artificial Sequence: Synthetic polypeptide
QAVLTQPSSLSAPPGASASLTCTLRSGFNVDSYRISWYQQKPGSPPQYLLRYKSDSDKQQGSGVPSRFSGSKDASANAGILLISGLQSEDEADYYCMIWHSSAWVFGGGTKLTVLR

SEQ ID NO: 66 - protein, 122 aa, Artificial Sequence
  Description of Artificial Sequence: Synthetic polypeptide
EVQLVESGGGLVQPGGSLRLSCAASGFTFSSYAMSWVRQAPGKGLEWVSQISPAGGYTNYADSVKGRFTISADTSKNTAYLQMNSLRAEDTAVYYCARELPYYRMSKVMDVQGQGTLVTVSS

SEQ ID NO: 67 - protein, 108 aa, Artificial Sequence [sequence omitted]

SEQ ID NO: 68 - protein, 119 aa, Artificial Sequence [sequence omitted]

SEQ ID NO: 69 - protein, 107 aa, Artificial Sequence
  Description of Artificial Sequence: Synthetic polypeptide
QIVLTQSPAIMSASPGEKVTMTCSASSSVSYMNWYQQKSGTSPKRWIYDTSKLASGVPAHFRGSGSGTSYSLTISGMEAEDAATYYCQQWSSNPFTFGSGTKLEINR

SEQ ID NO: 70 - protein, 116 aa, Artificial Sequence
  Description of Artificial Sequence: Synthetic polypeptide
QVQLQQSGAELVKPGASVKISCKASGYTFTDYYINWVKLAPGQGLEWIGWIYPGSGNTKYNEKFKGKATLTIDTSSSTAYMQLSSLTSEDTAVYFCVRDSPFFDYWGQGTLLTVSS

SEQ ID NO: 71 - protein, 113 aa, Artificial Sequence
  Description of Artificial Sequence: Synthetic polypeptide
DIVLTQSPDSLAVSLGERVTMNCKSSQSLLNSGMRKSFLAWYQQKPGQSPKLLIYWASTRESGVPDRFTGSGSGTDFTLTISSVQAEDVAVYYCKQSYHLFTFGSGTKLEIKR

SEQ ID NO: 72 - protein, 117 aa, Artificial Sequence [sequence omitted]

SEQ ID NO: 73 - protein, 114 aa, Artificial Sequence
  Description of Artificial Sequence: Synthetic polypeptide
DIEMTQSPDSLAVSLGERATINCRSSQSVLYSSSNRNYLAWYQQNPGQPPKLLIYWASTRESGVPDRFSGSGSGTDFTLTISSLQAEDVAVYYCQQYYSTPRTFGQGTKVEIKR

SEQ ID NO: 74 - protein, 119 aa, Artificial Sequence
  Description of Artificial Sequence: Synthetic polypeptide
EVQLVESGGGLVQPGGSLRLSCAASGFTFSIYSMNWVRQAPGKGLEWVSYISSSSSTIYYADSVKGRFTISRDNAKNSLYLQMNSLRDEDTAVYYCARDRGDFDAFDIWGQGTMVTVSS

SEQ ID NO: 75 - protein, 108 aa, Artificial Sequence
  Description of Artificial Sequence: Synthetic polypeptide
DIQMTQSPSSLSASVGDRVTITCQASQDITNYLNWYQQKPGKAPKLLIYDASNLETGVPSRFSGSGSGTDFTFTISSLQPEDIATYNCQQCENFPITFGQGTRLEIKR

SEQ ID NO: 76 - protein, 116 aa, Artificial Sequence
  Description of Artificial Sequence: Synthetic polypeptide
QVQLQESGPGLVKPSQTLSLTCTVSGYSISSDFAWNWIRQPPGKGLEWMGYISYSGNTRYQPSLKSRITISRDTSKNQFFLKLNSVTAADTATYYCVTAGRGFPYWGQGTLVTVSS

SEQ ID NO: 77 - protein, 108 aa, Artificial Sequence
  Description of Artificial Sequence: Synthetic polypeptide
DIQMTQSPSSMSVSVGDRVTITCHSSQDINSNIGWLQQKPGKSFKGLIYHGTNLDDGVPSRFSGSGSGTDYTLTISSLQPEDFATYYCVQYAQFPWTFGGGTKLEIKR

SEQ ID NO: 78 - protein, 120 aa, Artificial Sequence
  Description of Artificial Sequence: Synthetic polypeptide
EVQLVESGGGLVQPGGSLRLSCAASGFTISDYWIHWVRQAPGKGLEWVAGITPAGGYTYYADSVKGRFTISADTSKNTAYLQMNSLRAEDTAVYYCARFVFFLPYAMDYWGQGTLVTVSS

SEQ ID NO: 79 - protein, 108 aa, Artificial Sequence
  Description of Artificial Sequence: Synthetic polypeptide
DIQMTQSPSSLSASVGDRVTITCRASQDVSTAVAWYQQKPGKAPKLLIYSASFLYSGVPSRFSGSGSGTDFTLTISSLQPEDFATYYCQQSYTTPPTFGQGTKVEIKR

SEQ ID NO: 80 - protein, 123 aa, Artificial Sequence [sequence omitted]

SEQ ID NO: 81 - protein, 108 aa, Artificial Sequence
  Description of Artificial Sequence: Synthetic polypeptide
DIQLTQSPSSLSASVGDRVTITCSASQDISNYLNWYQQKPGKAPKVLIYFTSSLHSGVPSRFSGSGSGTDFTLTISSLQPEDFATYYCQQYSTVPWTFGQGTKVEIKR

SEQ ID NO: 82 - protein, 119 aa, Artificial Sequence [sequence omitted]

SEQ ID NO: 83 - protein, 112 aa, Artificial Sequence
  Description of Artificial Sequence: Synthetic polypeptide
QSALTQPASVSGSPGQSITISCTGTSSDVGSYNVVSWYQQHPGKAPKLIIYEVSQRPSGVSNRFSGSKSGNTASLTISGLQTEDEADYYCCSYAGSSIFVIFGGGTKVTVLG

SEQ ID NO: 84 - protein, 121 aa, Artificial Sequence
  Description of Artificial Sequence: Synthetic polypeptide
EVQLVESGGGLVQPGGSLRLSCAASGFTINASWIHWVRQAPGKGLEWVGAIYPYSGYTNYADSVKGRFTISADTSKNTAYLQMNSLRAEDTAVYYCARWGHSTSPWAMDYWGQGTLVTVSS

SEQ ID NO: 85 - protein, 108 aa, Artificial Sequence
  Description of Artificial Sequence: Synthetic polypeptide
DIQMTQSPSSLSASVGDRVTITCRASQVIRRSLAWYQQKPGKAPKLLIYAASNLASGVPSRFSGSGSGTDFTLTISSLQPEDFATYYCQQSNTSPLTFGQGTKVEIKR

SEQ ID NO: 86 - protein, 122 aa, Artificial Sequence
  Description of Artificial Sequence: Synthetic polypeptide
EVQLVESGGGLVQPGGSLRLSCAASGFSLTNNNVNWVRQAPGKGLEWVGGVWAGGATDYNSALKSRFTISRDNSKNTAYLQMNSLRAEDTAVYYCARDGGYSSSTLYAMDAWGQGTLVTVSS

SEQ ID NO: 87 - protein, 108 aa, Artificial Sequence
  Description of Artificial Sequence: Synthetic polypeptide
DIQMTQSPSSLSASVGDRVTITCRASEDIYNALAWYQQKPGKAPKLLIYNTDTLHTGVPSRFSGSGSGTDYTLTISSLQPEDFATYFCQHYFHYPRTFGQGTKVEIKR

SEQ ID NO: 88 - protein, 116 aa, Artificial Sequence
  Description of Artificial Sequence: Synthetic polypeptide
DVQLQESGPGLVKPSQSLSLTCTVTGFSITSPYAWNWIRQFPGNTLEWMGYISYRGSTTHHPSLKSRISITRDTSKNQFFLQLNSVTTEDTATYFCSSYGNYGAYSGQGTLVTVSA

SEQ ID NO: 89 - protein, 113 aa, Artificial Sequence
  Description of Artificial Sequence: Synthetic polypeptide
DVLLTQIPLSLPVSLGDQASISCRSSQSIVHSNGNTYLEWYLQKPGQSPKLLIYKVSTRFSGVPDRFSGSGSGTDFTLKISRVEAEDLGVYYCFQGSHVPLTFGAGTQLELKR

SEQ ID NO: 90 - protein, 121 aa, Artificial Sequence
  Description of Artificial Sequence: Synthetic polypeptide
QVQLVESGGGLVKPGGSLRLSCAASGFTFSSYGMHWVRQAPGKGLEWVAFIRYDGSNKYYADSVKGRFTISRDNSKNTLYLQMNSLRAEDTAVYYCAKDRGLGDGTYFDYWGQGTTVTVSS

SEQ ID NO: 91 - protein, 111 aa, Artificial Sequence
  Description of Artificial Sequence: Synthetic polypeptide
QSALTQPASVSGSPGQSITISCSGSSSNIGNNAVNWYQQLPGKAPKLLIYYDDLLPSGVSDRFSGSKSGTSAFLAISGLQSEDEADYYCAAWDDSLNGPVFGGGTKLTVLG

SEQ ID NO: 92 - protein, 330 aa, Homo sapiens
ASTKGPSVFPLAPSSKSTSGGTAALGCLVKDYFPEPVTVSWNSGALTSGVHTFPAVLQSSGLYSLSSVVTVPSSSLGTQTYICNVNHKPSNTKVDKKVEPKSCDKTHTCPPCPAPELLGGPSVFLFPPKPKDTLMISRTPEVTCVVVDVSHEDPEVKFNWYVDGVEVHNAKTKPREEQYNSTYRVVSVLTVLHQDWLNGKEYKCKVSNKALPAPIEKTISKAKGQPREPQVYTLPPSREEMTKNQVSLTCLVKGFYPSDIAVEWESNGQPENNYKTTPPVLDSDGSFFLYSKLTVDKSRWQQGNVFSCSVMHEALHNHYTQKSLSLSPGK

SEQ ID NO: 93 - protein, 330 aa, Homo sapiens
ASTKGPSVFPLAPSSKSTSGGTAALGCLVKDYFPEPVTVSWNSGALTSGVHTFPAVLQSSGLYSLSSVVTVPSSSLGTQTYICNVNHKPSNTKVDKKVEPKSCDKTHTCPPCPAPEAAGGPSVFLFPPKPKDTLMISRTPEVTCVVVDVSHEDPEVKFNWYVDGVEVHNAKTKPREEQYNSTYRVVSVLTVLHQDWLNGKEYKCKVSNKALPAPIEKTISKAKGQPREPQVYTLPPSREEMTKNQVSLTCLVKGFYPSDIAVEWESNGQPENNYKTTPPVLDSDGSFFLYSKLTVDKSRWQQGNVFSCSVMHEALHNHYTQKSLSLSPGK

SEQ ID NO: 94 - protein, 106 aa, Homo sapiens
TVAAPSVFIFPPSDEQLKSGTASVVCLLNNFYPREAKVQWKVDNALQSGNSQESVTEQDSKDSTYSLSSTLTLSKADYEKHKVYACEVTHQGLSSPVTKSFNRGEC

SEQ ID NO: 95 - protein, 105 aa, Homo sapiens
QPKAAPSVTLFPPSSEELQANKATLVCLISDFYPGAVTVAWKADSSPVKAGVETTTPSKQSNNKYAASSYLSLTPEQWKSHRSYSCQVTHEGSTVEKTVAPTECS

SEQ ID NO: 96 - protein, 244 aa, Artificial Sequence
  Description of Artificial Sequence: Synthetic polypeptide
EVQLVESGGGLVQPGGSLRLSCAASGFSLTNNNVNWVRQAPGKGLEWVGGVWAGGATDYNSALKSRFTISRDNSKNTAYLQMNSLRAEDTAVYYCARDGGYSSSTLYAMDAWGQGTLVTVSSASTKGPDVQLQESGPGLVKPSQSLSLTCTVTGFSITSPYAWNWIRQFPGNTLEWMGYISYRGSTTHHPSLKSRISITRDTSKNQFFLQLNSVTTEDTATYFCSSYGNYGAYSGQGTLVTVSA

SEQ ID NO: 97 - protein, 226 aa, Artificial Sequence
  Description of Artificial Sequence: Synthetic polypeptide
DIQMTQSPSSLSASVGDRVTITCRASEDIYNALAWYQQKPGKAPKLLIYNTDTLHTGVPSRFSGSGSGTDYTLTISSLQPEDFATYFCQHYFHYPRTFGQGTKVEIKRTVAAPDVLLTQIPLSLPVSLGDQASISCRSSQSIVHSNGNTYLEWYLQKPGQSPKLLIYKVSTRFSGVPDRFSGSGSGTDFTLKISRVEAEDLGVYYCFQGSHVPLTFGAGTQLELKR

SEQ ID NO: 98 - protein, 244 aa, Artificial Sequence
  Description of Artificial Sequence: Synthetic polypeptide
DVQLQESGPGLVKPSQSLSLTCTVTGFSITSPYAWNWIRQFPGNTLEWMGYISYRGSTTHHPSLKSRISITRDTSKNQFFLQLNSVTTEDTATYFCSSYGNYGAYSGQGTLVTVSAASTKGPEVQLVESGGGLVQPGGSLRLSCAASGFSLTNNNVNWVRQAPGKGLEWVGGVWAGGATDYNSALKSRFTISRDNSKNTAYLQMNSLRAEDTAVYYCARDGGYSSSTLYAMDAWGQGTLVTVSS

SEQ ID NO: 99 - protein, 226 aa, Artificial Sequence
  Description of Artificial Sequence: Synthetic polypeptide
DVLLTQIPLSLPVSLGDQASISCRSSQSIVHSNGNTYLEWYLQKPGQSPKLLIYKVSTRFSGVPDRFSGSGSGTDFTLKISRVEAEDLGVYYCFQGSHVPLTFGAGTQLELKRTVAAPDIQMTQSPSSLSASVGDRVTITCRASEDIYNALAWYQQKPGKAPKLLIYNTDTLHTGVPSRFSGSGSGTDYTLTISSLQPEDFATYFCQHYFHYPRTFGQGTKVEIKR

SEQ ID NO: 100 - protein, 249 aa, Artificial Sequence
  Description of Artificial Sequence: Synthetic polypeptide
EVQLVESGGGLVQPGGSLRLSCAASGFSLTNNNVNWVRQAPGKGLEWVGGVWAGGATDYNSALKSRFTISRDNSKNTAYLQMNSLRAEDTAVYYCARDGGYSSSTLYAMDAWGQGTLVTVSSASTKGPQVQLVESGGGLVKPGGSLRLSCAASGFTFSSYGMHWVRQAPGKGLEWVAFIRYDGSNKYYADSVKGRFTISRDNSKNTLYLQMNSLRAEDTAVYYCAKDRGLGDGTYFDYWGQGTTVTVSS

SEQ ID NO: 101 - protein, 224 aa, Artificial Sequence
  Description of Artificial Sequence: Synthetic polypeptide
DIQMTQSPSSLSASVGDRVTITCRASEDIYNALAWYQQKPGKAPKLLIYNTDTLHTGVPSRFSGSGSGTDYTLTISSLQPEDFATYFCQHYFHYPRTFGQGTKVEIKRTVAAPQSALTQPASVSGSPGQSITISCSGSSSNIGNNAVNWYQQLPGKAPKLLIYYDDLLPSGVSDRFSGSKSGTSAFLAISGLQSEDEADYYCAAWDDSLNGPVFGGGTKLTVLG

SEQ ID NO: 102 - protein, 249 aa, Artificial Sequence
  Description of Artificial Sequence: Synthetic polypeptide
QVQLVESGGGLVKPGGSLRLSCAASGFTFSSYGMHWVRQAPGKGLEWVAFIRYDGSNKYYADSVKGRFTISRDNSKNTLYLQMNSLRAEDTAVYYCAKDRGLGDGTYFDYWGQGTTVTVSSASTKGPEVQLVESGGGLVQPGGSLRLSCAASGFSLTNNNVNWVRQAPGKGLEWVGGVWAGGATDYNSALKSRFTISRDNSKNTAYLQMNSLRAEDTAVYYCARDGGYSSSTLYAMDAWGQGTLVTVSS

SEQ ID NO: 103 - protein, 225 aa, Artificial Sequence
  Description of Artificial Sequence: Synthetic polypeptide
QSALTQPASVSGSPGQSITISCSGSSSNIGNNAVNWYQQLPGKAPKLLIYYDDLLPSGVSDRFSGSKSGTSAFLAISGLQSEDEADYYCAAWDDSLNGPVFGGGTKLTVLGQPKAAPDIQMTQSPSSLSASVGDRVTITCRASEDIYNALAWYQQKPGKAPKLLIYNTDTLHTGVPSRFSGSGSGTDYTLTISSLQPEDFATYFCQHYFHYPRTFGQGTKVEIKR

SEQ ID NO: 104 - protein, 247 aa, Artificial Sequence
  Description of Artificial Sequence: Synthetic polypeptide
EVQLVESGGGLVQPGGSLRLSCAASGFSLTNNNVNWVRQAPGKGLEWVGGVWAGGATDYNSALKSRFTISRDNSKNTAYLQMNSLRAEDTAVYYCARDGGYSSSTLYAMDAWGQGTLVTVSSASTKGPQVQLKQSGPGLVQPSQSLSITCTVSGFSLTNYGVHWVRQSPGKGLEWLGVIWSGGNTDYNTPFTSRLSINKDNSKSQVFFKMNSLQSNDTAIYYCARALTYYDYEFAYWGQGTLVTVSA

SEQ ID NO: 105 - protein, 221 aa, Artificial Sequence
  Description of Artificial Sequence: Synthetic polypeptide
DIQMTQSPSSLSASVGDRVTITCRASEDIYNALAWYQQKPGKAPKLLIYNTDTLHTGVPSRFSGSGSGTDYTLTISSLQPEDFATYFCQHYFHYPRTFGQGTKVEIKRTVAAPDILLTQSPVILSVSPGERVSFSCRASQSIGTNIHWYQQRTNGSPRLLIKYASESISGIPSRFSGSGSGTDFTLSINSVESEDIADYYCQQNNNWPTTFGAGTKLELKR

SEQ ID NO: 106 - protein, 247 aa, Artificial Sequence
  Description of Artificial Sequence: Synthetic polypeptide
QVQLKQSGPGLVQPSQSLSITCTVSGFSLTNYGVHWVRQSPGKGLEWLGVIWSGGNTDYNTPFTSRLSINKDNSKSQVFFKMNSLQSNDTAIYYCARALTYYDYEFAYWGQGTLVTVSAASTKGPEVQLVESGGGLVQPGGSLRLSCAASGFSLTNNNVNWVRQAPGKGLEWVGGVWAGGATDYNSALKSRFTISRDNSKNTAYLQMNSLRAEDTAVYYCARDGGYSSSTLYAMDAWGQGTLVTVSS

SEQ ID NO: 107 - protein, 221 aa, Artificial Sequence
  Description of Artificial Sequence: Synthetic polypeptide
DILLTQSPVILSVSPGERVSFSCRASQSIGTNIHWYQQRTNGSPRLLIKYASESISGIPSRFSGSGSGTDFTLSINSVESEDIADYYCQQNNNWPTTFGAGTKLELKRTVAAPDIQMTQSPSSLSASVGDRVTITCRASEDIYNALAWYQQKPGKAPKLLIYNTDTLHTGVPSRFSGSGSGTDYTLTISSLQPEDFATYFCQHYFHYPRTFGQGTKVEIKR

SEQ ID NO: 108 - protein, 248 aa, Artificial Sequence
  Description of Artificial Sequence: Synthetic polypeptide
EVQLVESGGGLVQPGGSLRLSCAASGFSLTNNNVNWVRQAPGKGLEWVGGVWAGGATDYNSALKSRFTISRDNSKNTAYLQMNSLRAEDTAVYYCARDGGYSSSTLYAMDAWGQGTLVTVSSASTKGPQVQLVQSGAEVKKPGASVKVSCKASGYTFTSYDINWVRQATGQGLEWMGWMNPNSGNTGYAQKFQGRVTMTRNTSISTAYMELSSLRSEDTAVYYCARDPYYYYYGMDVWGQGTTVTVSS

SEQ ID NO: 109 - protein, 225 aa, Artificial Sequence
  Description of Artificial Sequence: Synthetic polypeptide
DIQMTQSPSSLSASVGDRVTITCRASEDIYNALAWYQQKPGKAPKLLIYNTDTLHTGVPSRFSGSGSGTDYTLTISSLQPEDFATYFCQHYFHYPRTFGQGTKVEIKRTVAAPQSVLTQPPSVSAAPGQKVTISCSGSSSNIENNHVSWYQQLPGTAPKLLIYDNNKRPSGIPDRFSGSKSGTSATLGITGLQTGDEADYYCETWDTSLSAGRVFGGGTKLTVLG

SEQ ID NO: 110 - protein, 248 aa, Artificial Sequence
  Description of Artificial Sequence: Synthetic polypeptide
QVQLVQSGAEVKKPGASVKVSCKASGYTFTSYDINWVRQATGQGLEWMGWMNPNSGNTGYAQKFQGRVTMTRNTSISTAYMELSSLRSEDTAVYYCARDPYYYYYGMDVWGQGTTVTVSSASTKGPEVQLVESGGGLVQPGGSLRLSCAASGFSLTNNNVNWVRQAPGKGLEWVGGVWAGGATDYNSALKSRFTISRDNSKNTAYLQMNSLRAEDTAVYYCARDGGYSSSTLYAMDAWGQGTLVTVSS

SEQ ID NO: 111 - protein, 226 aa, Artificial Sequence
  Description of Artificial Sequence: Synthetic polypeptide
QSVLTQPPSVSAAPGQKVTISCSGSSSNIENNHVSWYQQLPGTAPKLLIYDNNKRPSGIPDRFSGSKSGTSATLGITGLQTGDEADYYCETWDTSLSAGRVFGGGTKLTVLGQPKAAPDIQMTQSPSSLSASVGDRVTITCRASEDIYNALAWYQQKPGKAPKLLIYNTDTLHTGVPSRFSGSGSGTDYTLTISSLQPEDFATYFCQHYFHYPRTFGQGTKVEIKR

SEQ ID NO: 112 - protein, 252 aa, Artificial Sequence
  Description of Artificial Sequence: Synthetic polypeptide
EVQLVESGGGLVQPGGSLRLSCAASGFSLTNNNVNWVRQAPGKGLEWVGGVWAGGATDYNSALKSRFTISRDNSKNTAYLQMNSLRAEDTAVYYCARDGGYSSSTLYAMDAWGQGTLVTVSSASTKGPEVQLVQSGGGLVKPGGSLRLSCAASGFTFSSYAMHWVRQAPGKGLEWVAVISYDGSNKYYADSVKGRFTISRDNSKNTLYLQMNSLRAEDTAVYYCARFSGWPNNYYYYGMDVWGQGTTVTVSS

SEQ ID NO: 113 - protein, 227 aa, Artificial Sequence
  Description of Artificial Sequence: Synthetic polypeptide
DIQMTQSPSSLSASVGDRVTITCRASEDIYNALAWYQQKPGKAPKLLIYNTDTLHTGVPSRFSGSGSGTDYTLTISSLQPEDFATYFCQHYFHYPRTFGQGTKVEIKRTVAAPDVVMTQSPLSLPVTPGEPASISCRSSQSLLHSNGFNYVDWYLQKPGQSPHLLIYFGSYRASGVPDRFSGSGSGTDFTLKISRVEAEDVGVYYCMQALQTPPWTFGQGTKVEIRR

SEQ ID NO: 114 - protein, 252 aa, Artificial Sequence
  Description of Artificial Sequence: Synthetic polypeptide
EVQLVQSGGGLVKPGGSLRLSCAASGFTFSSYAMHWVRQAPGKGLEWVAVISYDGSNKYYADSVKGRFTISRDNSKNTLYLQMNSLRAEDTAVYYCARFSGWPNNYYYYGMDVWGQGTTVTVSSASTKGPEVQLVESGGGLVQPGGSLRLSCAASGFSLTNNNVNWVRQAPGKGLEWVGGVWAGGATDYNSALKSRFTISRDNSKNTAYLQMNSLRAEDTAVYYCARDGGYSSSTLYAMDAWGQGTLVTVSS

SEQ ID NO: 115 - protein, 227 aa, Artificial Sequence
  Description of Artificial Sequence: Synthetic polypeptide
DVVMTQSPLSLPVTPGEPASISCRSSQSLLHSNGFNYVDWYLQKPGQSPHLLIYFGSYRASGVPDRFSGSGSGTDFTLKISRVEAEDVGVYYCMQALQTPPWTFGQGTKVEIRRTVAAPDIQMTQSPSSLSASVGDRVTITCRASEDIYNALAWYQQKPGKAPKLLIYNTDTLHTGVPSRFSGSGSGTDYTLTISSLQPEDFATYFCQHYFHYPRTFGQGTKVEIKR

SEQ ID NO: 116 - protein, 245 aa, Artificial Sequence
  Description of Artificial Sequence: Synthetic polypeptide
EVQLVESGGGLVQPGGSLRLSCAASGFSLTNNNVNWVRQAPGKGLEWVGGVWAGGATDYNSALKSRFTISRDNSKNTAYLQMNSLRAEDTAVYYCARDGGYSSSTLYAMDAWGQGTLVTVSSASTKGPQVQLQQWGAGLLKPSETLSLTCAVYGGSFSGYYWSWIRQPPGKGLEWIGEINHSGSTNYNPSLKSRVTISVETSKNQFSLKLSSVTAADTAVYYCARDKWTWYFDLWGRGTLVTVSS

SEQ ID NO: 117 - protein, 227 aa, Artificial Sequence
  Description of Artificial Sequence: Synthetic polypeptide
DIQMTQSPSSLSASVGDRVTITCRASEDIYNALAWYQQKPGKAPKLLIYNTDTLHTGVPSRFSGSGSGTDYTLTISSLQPEDFATYFCQHYFHYPRTFGQGTKVEIKRTVAAPDIEMTQSPDSLAVSLGERATINCRSSQSVLYSSSNRNYLAWYQQNPGQPPKLLIYWASTRESGVPDRFSGSGSGTDFTLTISSLQAEDVAVYYCQQYYSTPRTFGQGTKVEIKR

SEQ ID NO: 118 - protein, 245 aa, Artificial Sequence
  Description of Artificial Sequence: Synthetic polypeptide
QVQLQQWGAGLLKPSETLSLTCAVYGGSFSGYYWSWIRQPPGKGLEWIGEINHSGSTNYNPSLKSRVTISVETSKNQFSLKLSSVTAADTAVYYCARDKWTWYFDLWGRGTLVTVSSASTKGPEVQLVESGGGLVQPGGSLRLSCAASGFSLTNNNVNWVRQAPGKGLEWVGGVWAGGATDYNSALKSRFTISRDNSKNTAYLQMNSLRAEDTAVYYCARDGGYSSSTLYAMDAWGQGTLVTVSS

SEQ ID NO: 119 - protein, 227 aa, Artificial Sequence
  Description of Artificial Sequence: Synthetic polypeptide
DIEMTQSPDSLAVSLGERATINCRSSQSVLYSSSNRNYLAWYQQNPGQPPKLLIYWASTRESGVPDRFSGSGSGTDFTLTISSLQAEDVAVYYCQQYYSTPRTFGQGTKVEIKRTVAAPDIQMTQSPSSLSASVGDRVTITCRASEDIYNALAWYQQKPGKAPKLLIYNTDTLHTGVPSRFSGSGSGTDYTLTISSLQPEDFATYFCQHYFHYPRTFGQGTKVEIKR

SEQ ID NO: 120 - protein, 247 aa, Artificial Sequence
  Description of Artificial Sequence: Synthetic polypeptide
EVQLVESGGGLVQPGGSLRLSCAASGFSLTNNNVNWVRQAPGKGLEWVGGVWAGGATDYNSALKSRFTISRDNSKNTAYLQMNSLRAEDTAVYYCARDGGYSSSTLYAMDAWGQGTLVTVSSASTKGPEVQLVESGGGLVQPGGSLRLSCAASGFTFSIYSMNWVRQAPGKGLEWVSYISSSSSTIYYADSVKGRFTISRDNAKNSLYLQMNSLRDEDTAVYYCARDRGDFDAFDIWGQGTMVTVSS

SEQ ID NO: 121 - protein, 221 aa, Artificial Sequence
  Description of Artificial Sequence: Synthetic polypeptide
DIQMTQSPSSLSASVGDRVTITCRASEDIYNALAWYQQKPGKAPKLLIYNTDTLHTGVPSRFSGSGSGTDYTLTISSLQPEDFATYFCQHYFHYPRTFGQGTKVEIKRTVAAPDIQMTQSPSSLSASVGDRVTITCQASQDITNYLNWYQQKPGKAPKLLIYDASNLETGVPSRFSGSGSGTDFTFTISSLQPEDIATYNCQQCENFPITFGQGTRLEIKR

SEQ ID NO: 122 - protein, 247 aa, Artificial Sequence
  Description of Artificial Sequence: Synthetic polypeptide
EVQLVESGGGLVQPGGSLRLSCAASGFTFSIYSMNWVRQAPGKGLEWVSYISSSSSTIYYADSVKGRFTISRDNAKNSLYLQMNSLRDEDTAVYYCARDRGDFDAFDIWGQGTMVTVSSASTKGPEVQLVESGGGLVQPGGSLRLSCAASGFSLTNNNVNWVRQAPGKGLEWVGGVWAGGATDYNSALKSRFTISRDNSKNTAYLQMNSLRAEDTAVYYCARDGGYSSSTLYAMDAWGQGTLVTVSS

SEQ ID NO: 123 - protein, 221 aa, Artificial Sequence
  Description of Artificial Sequence: Synthetic polypeptide
DIQMTQSPSSLSASVGDRVTITCQASQDITNYLNWYQQKPGKAPKLLIYDASNLETGVPSRFSGSGSGTDFTFTISSLQPEDIATYNCQQCENFPITFGQGTRLEIKRTVAAPDIQMTQSPSSLSASVGDRVTITCRASEDIYNALAWYQQKPGKAPKLLIYNTDTLHTGVPSRFSGSGSGTDYTLTISSLQPEDFATYFCQHYFHYPRTFGQGTKVEIKR

SEQ ID NO: 124 - protein, 247 aa, Artificial Sequence
  Description of Artificial Sequence: Synthetic polypeptide
EVQLVESGGGLVQPGGSLRLSCAASGFSLTNNNVNWVRQAPGKGLEWVGGVWAGGATDYNSALKSRFTISRDNSKNTAYLQMNSLRAEDTAVYYCARDGGYSSSTLYAMDAWGQGTLVTVSSASTKGPQVQLQQSGAELARPGASVKMSCKASGYTFTRYTMHWVKQRPGQGLEWIGYINPSRGYTNYNQKFKDKATLTTDKSSSTAYMQLSSLTSEDSAVYYCARYYDDHYCLDYWGQGTTLTVSS

SEQ ID NO: 125 - protein, 220 aa, Artificial Sequence
  Description of Artificial Sequence: Synthetic polypeptide
DIQMTQSPSSLSASVGDRVTITCRASEDIYNALAWYQQKPGKAPKLLIYNTDTLHTGVPSRFSGSGSGTDYTLTISSLQPEDFATYFCQHYFHYPRTFGQGTKVEIKRTVAAPQIVLTQSPAIMSASPGEKVTMTCRASSSVSYMNWYQQKSGTSPKRWIYDTSKVASGVPYRFSGSGSGTSYSLTISSMEAEDAATYYCQQWSSNPLTFGSGTKLEINR

SEQ ID NO: 126 - protein, 247 aa, Artificial Sequence
  Description of Artificial Sequence: Synthetic polypeptide
QVQLQQSGAELARPGASVKMSCKASGYTFTRYTMHWVKQRPGQGLEWIGYINPSRGYTNYNQKFKDKATLTTDKSSSTAYMQLSSLTSEDSAVYYCARYYDDHYCLDYWGQGTTLTVSSASTKGPEVQLVESGGGLVQPGGSLRLSCAASGFSLTNNNVNWVRQAPGKGLEWVGGVWAGGATDYNSALKSRFTISRDNSKNTAYLQMNSLRAEDTAVYYCARDGGYSSSTLYAMDAWGQGTLVTVSS

SEQ ID NO: 127 - protein, 220 aa, Artificial Sequence
  Description of Artificial Sequence: Synthetic polypeptide
QIVLTQSPAIMSASPGEKVTMTCRASSSVSYMNWYQQKSGTSPKRWIYDTSKVASGVPYRFSGSGSGTSYSLTISSMEAEDAATYYCQQWSSNPLTFGSGTKLEINRTVAAPDIQMTQSPSSLSASVGDRVTITCRASEDIYNALAWYQQKPGKAPKLLIYNTDTLHTGVPSRFSGSGSGTDYTLTISSLQPEDFATYFCQHYFHYPRTFGQGTKVEIKR

SEQ ID NO: 128 - protein, 253 aa, Artificial Sequence
  Description of Artificial Sequence: Synthetic polypeptide
EVQLVESGGGLVQPGGSLRLSCAASGFSLTNNNVNWVRQAPGKGLEWVGGVWAGGATDYNSALKSRFTISRDNSKNTAYLQMNSLRAEDTAVYYCARDGGYSSSTLYAMDAWGQGTLVTVSSASTKGPEVQLLESGGGLVQPGGSLRLSCTASGFTFSSYAMNWVRQAPGKGLEWVSAISGSGGTTFYADSVKGRFTISRDNSRTTLYLQMNSLRAEDTAVYYCAKDLGWSDSYYYYYGMDVWGQGTTVTVSS

SEQ ID NO: 129 - protein, 221 aa, Artificial Sequence
  Description of Artificial Sequence: Synthetic polypeptide
DIQMTQSPSSLSASVGDRVTITCRASEDIYNALAWYQQKPGKAPKLLIYNTDTLHTGVPSRFSGSGSGTDYTLTISSLQPEDFATYFCQHYFHYPRTFGQGTKVEIKRTVAAPDIQMTQFPSSLSASVGDRVTITCRASQGIRNDLGWYQQKPGKAPKRLIYAASRLHRGVPSRFSGSGSGTEFTLTISSLQPEDFATYYCLQHNSYPCSFGQGTKLEIKR

SEQ ID NO: 130 - protein, 253 aa, Artificial Sequence
  Description of Artificial Sequence: Synthetic polypeptide
EVQLLESGGGLVQPGGSLRLSCTASGFTFSSYAMNWVRQAPGKGLEWVSAISGSGGTTFYADSVKGRFTISRDNSRTTLYLQMNSLRAEDTAVYYCAKDLGWSDSYYYYYGMDVWGQGTTVTVSSASTKGPEVQLVESGGGLVQPGGSLRLSCAASGFSLTNNNVNWVRQAPGKGLEWVGGVWAGGATDYNSALKSRFTISRDNSKNTAYLQMNSLRAEDTAVYYCARDGGYSSSTLYAMDAWGQGTLVTVSS

SEQ ID NO: 131 - protein, 221 aa, Artificial Sequence
  Description of Artificial Sequence: Synthetic polypeptide
DIQMTQFPSSLSASVGDRVTITCRASQGIRNDLGWYQQKPGKAPKRLIYAASRLHRGVPSRFSGSGSGTEFTLTISSLQPEDFATYYCLQHNSYPCSFGQGTKLEIKRTVAAPDIQMTQSPSSLSASVGDRVTITCRASEDIYNALAWYQQKPGKAPKLLIYNTDTLHTGVPSRFSGSGSGTDYTLTISSLQPEDFATYFCQHYFHYPRTFGQGTKVEIKR

SEQ ID NO: 132 - protein, 250 aa, Artificial Sequence
  Description of Artificial Sequence: Synthetic polypeptide
EVQLVESGGGLVQPGGSLRLSCAASGFSLTNNNVNWVRQAPGKGLEWVGGVWAGGATDYNSALKSRFTISRDNSKNTAYLQMNSLRAEDTAVYYCARDGGYSSSTLYAMDAWGQGTLVTVSSASTKGPQVQLVESGGGLVKPGGSLRLSCAASGFTFSDYYMSWIRQAPGKGLEWVSYISSSGSTIYYADSVKGRFTISRDNAKNSLYLQMNSLRAEDTAVYYCARDEYNSGWYVLFDYWGQGTLVTVSS

SEQ ID NO: 133 - protein, 221 aa, Artificial Sequence
  Description of Artificial Sequence: Synthetic polypeptide
DIQMTQSPSSLSASVGDRVTITCRASEDIYNALAWYQQKPGKAPKLLIYNTDTLHTGVPSRFSGSGSGTDYTLTISSLQPEDFATYFCQHYFHYPRTFGQGTKVEIKRTVAAPDIQMTQSPSSVSASVGDRVTITCRASQGISSWLAWYQQKPGKAPNLLIYEASSLQSGVPSRFGGSGSGTDFTLTISSLQPEDFATYYCQQANGFPWTFGQGTKVEIKR

SEQ ID NO: 134 - protein, 250 aa, Artificial Sequence
  Description of Artificial Sequence: Synthetic polypeptide
QVQLVESGGGLVKPGGSLRLSCAASGFTFSDYYMSWIRQAPGKGLEWVSYISSSGSTIYYADSVKGRFTISRDNAKNSLYLQMNSLRAEDTAVYYCARDEYNSGWYVLFDYWGQGTLVTVSSASTKGPEVQLVESGGGLVQPGGSLRLSCAASGFSLTNNNVNWVRQAPGKGLEWVGGVWAGGATDYNSALKSRFTISRDNSKNTAYLQMNSLRAEDTAVYYCARDGGYSSSTLYAMDAWGQGTLVTVSS

SEQ ID NO: 135 - protein, 221 aa, Artificial Sequence
  Description of Artificial Sequence: Synthetic polypeptide
DIQMTQSPSSVSASVGDRVTITCRASQGISSWLAWYQQKPGKAPNLLIYEASSLQSGVPSRFGGSGSGTDFTLTISSLQPEDFATYYCQQANGFPWTFGQGTKVEIKRTVAAPDIQMTQSPSSLSASVGDRVTITCRASEDIYNALAWYQQKPGKAPKLLIYNTDTLHTGVPSRFSGSGSGTDYTLTISSLQPEDFATYFCQHYFHYPRTFGQGTKVEIKR

SEQ ID NO: 136 - protein, 251 aa, Artificial Sequence
  Description of Artificial Sequence: Synthetic polypeptide
EVQLVESGGGLVQPGGSLRLSCAASGFSLTNNNVNWVRQAPGKGLEWVGGVWAGGATDYNSALKSRFTISRDNSKNTAYLQMNSLRAEDTAVYYCARDGGYSSSTLYAMDAWGQGTLVTVSSASTKGPEVQLVESGGGLVQPGGSLRLSCAASGYTFTNYGMNWVRQAPGKGLEWVGWINTYTGEPTYAADFKRRFTFSLDTSKSTAYLQMNSLRAEDTAVYYCAKYPHYYGSSHWYFDVWGQGTLVTVSS

SEQ ID NO: 137 - protein, 221 aa, Artificial Sequence
  Description of Artificial Sequence: Synthetic polypeptide
DIQMTQSPSSLSASVGDRVTITCRASEDIYNALAWYQQKPGKAPKLLIYNTDTLHTGVPSRFSGSGSGTDYTLTISSLQPEDFATYFCQHYFHYPRTFGQGTKVEIKRTVAAPDIQMTQSPSSLSASVGDRVTITCSASQDISNYLNWYQQKPGKAPKVLIYFTSSLHSGVPSRFSGSGSGTDFTLTISSLQPEDFATYYCQQYSTVPWTFGQGTKVEIKR

SEQ ID NO: 138 - protein, 251 aa, Artificial Sequence
  Description of Artificial Sequence: Synthetic polypeptide
EVQLVESGGGLVQPGGSLRLSCAASGYTFTNYGMNWVRQAPGKGLEWVGWINTYTGEPTYAADFKRRFTFSLDTSKSTAYLQMNSLRAEDTAVYYCAKYPHYYGSSHWYFDVWGQGTLVTVSSASTKGPEVQLVESGGGLVQPGGSLRLSCAASGFSLTNNNVNWVRQAPGKGLEWVGGVWAGGATDYNSALKSRFTISRDNSKNTAYLQMNSLRAEDTAVYYCARDGGYSSSTLYAMDAWGQGTLVTVSS

SEQ ID NO: 139 - protein, 221 aa, Artificial Sequence
  Description of Artificial Sequence: Synthetic polypeptide
DIQMTQSPSSLSASVGDRVTITCSASQDISNYLNWYQQKPGKAPKVLIYFTSSLHSGVPSRFSGSGSGTDFTLTISSLQPEDFATYYCQQYSTVPWTFGQGTKVEIKRTVAAPDIQMTQSPSSLSASVGDRVTITCRASEDIYNALAWYQQKPGKAPKLLIYNTDTLHTGVPSRFSGSGSGTDYTLTISSLQPEDFATYFCQHYFHYPRTFGQGTKVEIKR

SEQ ID NO: 140 - protein, 246 aa, Artificial Sequence
  Description of Artificial Sequence: Synthetic polypeptide
EVQLVESGGGLVQPGGSLRLSCAASGFSLTNNNVNWVRQAPGKGLEWVGGVWAGGATDYNSALKSRFTISRDNSKNTAYLQMNSLRAEDTAVYYCARDGGYSSSTLYAMDAWGQGTLVTVSSASTKGPEVQLVESGGGLVQPGGSLRLSCAASGFTFTDNWISWVRQAPGKGLEWVGYISPNSGFTYYADSVKGRFTISADTSKNTAYLQMNSLRAEDTAVYYCARDNFGGYFDYWGQGTLVTVSS

SEQ ID NO: 141 - protein, 222 aa, Artificial Sequence
  Description of Artificial Sequence: Synthetic polypeptide
DIQMTQSPSSLSASVGDRVTITCRASEDIYNALAWYQQKPGKAPKLLIYNTDTLHTGVPSRFSGSGSGTDYTLTISSLQPEDFATYFCQHYFHYPRTFGQGTKVEIKRTVAAPDIQMTQSPSSLSASVGDRVTITCRASQDVSTAVAWYQQKPGKAPKLLIYSASFLYSGVPSRFSGSGSGTDFTLTISSLQPEDFATTYYCQQSYTGTVTFGQGTKVEIKR

SEQ ID NO: 142 - protein, 246 aa, Artificial Sequence
  Description of Artificial Sequence: Synthetic polypeptide
EVQLVESGGGLVQPGGSLRLSCAASGFTFTDNWISWVRQAPGKGLEWVGYISPNSGFTYYADSVKGRFTISADTSKNTAYLQMNSLRAEDTAVYYCARDNFGGYFDYWGQGTLVTVSSASTKGPEVQLVESGGGLVQPGGSLRLSCAASGFSLTNNNVNWVRQAPGKGLEWVGGVWAGGATDYNSALKSRFTISRDNSKNTAYLQMNSLRAEDTAVYYCARDGGYSSSTLYAMDAWGQGTLVTVSS

SEQ ID NO: 143 - protein, 222 aa, Artificial Sequence
  Description of Artificial Sequence: Synthetic polypeptide
DIQMTQSPSSLSASVGDRVTITCRASQDVSTAVAWYQQKPGKAPKLLIYSASFLYSGVPSRFSGSGSGTDFTLTISSLQPEDFATTYYCQQSYTGTVTFGQGTKVEIKRTVAAPDIQMTQSPSSLSASVGDRVTITCRASEDIYNALAWYQQKPGKAPKLLIYNTDTLHTGVPSRFSGSGSGTDYTLTISSLQPEDFATYFCQHYFHYPRTFGQGTKVEIKR

SEQ ID NO: 144 - protein, 244 aa, Artificial Sequence
  Description of Artificial Sequence: Synthetic polypeptide
EVQLVESGGGLVQPGGSLRLSCAASGFSLTNNNVNWVRQAPGKGLEWVGGVWAGGATDYNSALKSRFTISRDNSKNTAYLQMNSLRAEDTAVYYCARDGGYSSSTLYAMDAWGQGTLVTVSSASTKGPQVQLQQSGAELVKPGASVKISCKASGYTFTDYYINWVKLAPGQGLEWIGWIYPGSGNTKYNEKFKGKATLTIDTSSSTAYMQLSSLTSEDTAVYFCVRDSPFFDYWGQGTLLTVSS

SEQ ID NO: 145 - protein, 226 aa, Artificial Sequence
  Description of Artificial Sequence: Synthetic polypeptide
DIQMTQSPSSLSASVGDRVTITCRASEDIYNALAWYQQKPGKAPKLLIYNTDTLHTGVPSRFSGSGSGTDYTLTISSLQPEDFATYFCQHYFHYPRTFGQGTKVEIKRTVAAPDIVLTQSPDSLAVSLGERVTMNCKSSQSLLNSGMRKSFLAWYQQKPGQSPKLLIYWASTRESGVPDRFTGSGSGTDFTLTISSVQAEDVAVYYCKQSYHLFTFGSGTKLEIKR

SEQ ID NO: 146 - protein, 244 aa, Artificial Sequence
  Description of Artificial Sequence: Synthetic polypeptide
QVQLQQSGAELVKPGASVKISCKASGYTFTDYYINWVKLAPGQGLEWIGWIYPGSGNTKYNEKFKGKATLTIDTSSSTAYMQLSSLTSEDTAVYFCVRDSPFFDYWGQGTLLTVSSASTKGPEVQLVESGGGLVQPGGSLRLSCAASGFSLTNNNVNWVRQAPGKGLEWVGGVWAGGATDYNSALKSRFTISRDNSKNTAYLQMNSLRAEDTAVYYCARDGGYSSSTLYAMDAWGQGTLVTVSS

SEQ ID NO: 147 - protein, 226 aa, Artificial Sequence
  Description of Artificial Sequence: Synthetic polypeptide
DIVLTQSPDSLAVSLGERVTMNCKSSQSLLNSGMRKSFLAWYQQKPGQSPKLLIYWASTRESGVPDRFTGSGSGTDFTLTISSVQAEDVAVYYCKQSYHLFTFGSGTKLEIKRTVAAPDIQMTQSPSSLSASVGDRVTITCRASEDIYNALAWYQQKPGKAPKLLIYNTDTLHTGVPSRFSGSGSGTDYTLTISSLQPEDFATYFCQHYFHYPRTFGQGTKVEIKR

SEQ ID NO: 148 - protein, 255 aa, Artificial Sequence
  Description of Artificial Sequence: Synthetic polypeptide
EVQLVESGGGLVQPGGSLRLSCAASGFSLTNNNVNWVRQAPGKGLEWVGGVWAGGATDYNSALKSRFTISRDNSKNTAYLQMNSLRAEDTAVYYCARDGGYSSSTLYAMDAWGQGTLVTVSSASTKGPQVQLQESGPGLVKPSEILSLTCTVSGGSISSHYWSWVRQPPGKGLEWIGYIYYSGSTNYNPSLKSRVTISVDTSKNQFSLNLSSVTAADTAVYYCARIPNYYDRSGYYPGYWYFDLWGRGTLVTVSS

SEQ ID NO: 149 - protein, 229 aa, Artificial Sequence
  Description of Artificial Sequence: Synthetic polypeptide
DIQMTQSPSSLSASVGDRVTITCRASEDIYNALAWYQQKPGKAPKLLIYNTDTLHTGVPSRFSGSGSGTDYTLTISSLQPEDFATYFCQHYFHYPRTFGQGTKVEIKRTVAAPQAVLTQPSSLSAPPGASASLTCTLRSGFNVDSYRISWYQQKPGSPPQYLLRYKSDSDKQQGSGVPSRFSGSKDASANAGILLISGLQSEDEADYYCMIWHSSAWVFGGGTKLTVLR

SEQ ID NO: 150 - protein, 255 aa, Artificial Sequence
  Description of Artificial Sequence: Synthetic polypeptide
QVQLQESGPGLVKPSEILSLTCTVSGGSISSHYWSWVRQPPGKGLEWIGYIYYSGSTNYNPSLKSRVTISVDTSKNQFSLNLSSVTAADTAVYYCARIPNYYDRSGYYPGYWYFDLWGRGTLVTVSSASTKGPEVQLVESGGGLVQPGGSLRLSCAASGFSLTNNNVNWVRQAPGKGLEWVGGVWAGGATDYNSALKSRFTISRDNSKNTAYLQMNSLRAEDTAVYYCARDGGYSSSTLYAMDAWGQGTLVTVSS

SEQ ID NO: 151 - protein, 229 aa, Artificial Sequence
  Description of Artificial Sequence: Synthetic polypeptide
QAVLTQPSSLSAPPGASASLTCTLRSGFNVDSYRISWYQQKPGSPPQYLLRYKSDSDKQQGSGVPSRFSGSKDASANAGILLISGLQSEDEADYYCMIWHSSAWVFGGGTKLTVLRTVAAPDIQMTQSPSSLSASVGDRVTITCRASEDIYNALAWYQQKPGKAPKLLIYNTDTLHTGVPSRFSGSGSGTDYTLTISSLQPEDFATYFCQHYFHYPRTFGQGTKVEIKR

SEQ ID NO: 152 - protein, 249 aa, Artificial Sequence
  Description of Artificial Sequence: Synthetic polypeptide
EVQLVESGGGLVQPGGSLRLSCAASGFSLTNNNVNWVRQAPGKGLEWVGGVWAGGATDYNSALKSRFTISRDNSKNTAYLQMNSLRAEDTAVYYCARDGGYSSSTLYAMDAWGQGTLVTVSSASTKGPQVQLQQPGAELVKPGASVKMSCKASGYTFTSYNMHWVKQTPGRGLEWIGAIYPGNGDTSYNQKFKGKATLTADKSSSTAYMQLSSLTSEDSAVYYCARSTYYGGDWYFNVWGAGTTVTVSA

SEQ ID NO: 153 - protein, 220 aa, Artificial Sequence
  Description of Artificial Sequence: Synthetic polypeptide
DIQMTQSPSSLSASVGDRVTITCRASEDIYNALAWYQQKPGKAPKLLIYNTDTLHTGVPSRFSGSGSGTDYTLTISSLQPEDFATYFCQHYFHYPRTFGQGTKVEIKRTVAAPQIVLSQSPAILSPSPGEKVTMTCRASSSVSYIHWFQQKPGSSPKPWIYATSNLASGVPVRFSGSGSGTSYSLTISRVEAEDAATYYCQQWTSNPPTFGGGTKLEIKR

SEQ ID NO: 154 - protein, 249 aa, Artificial Sequence
  Description of Artificial Sequence: Synthetic polypeptide
QVQLQQPGAELVKPGASVKMSCKASGYTFTSYNMHWVKQTPGRGLEWIGAIYPGNGDTSYNQKFKGKATLTADKSSSTAYMQLSSLTSEDSAVYYCARSTYYGGDWYFNVWGAGTTVTVSAASTKGPEVQLVESGGGLVQPGGSLRLSCAASGFSLTNNNVNWVRQAPGKGLEWVGGVWAGGATDYNSALKSRFTISRDNSKNTAYLQMNSLRAEDTAVYYCARDGGYSSSTLYAMDAWGQGTLVTVSS

SEQ ID NO: 155 - protein, 220 aa, Artificial Sequence
  Description of Artificial Sequence: Synthetic polypeptide
QIVLSQSPAILSPSPGEKVTMTCRASSSVSYIHWFQQKPGSSPKPWIYATSNLASGVPVRFSGSGSGTSYSLTISRVEAEDAATYYCQQWTSNPPTFGGGTKLEIKRTVAAPDIQMTQSPSSLSASVGDRVTITCRASEDIYNALAWYQQKPGKAPKLLIYNTDTLHTGVPSRFSGSGSGTDYTLTISSLQPEDFATYFCQHYFHYPRTFGQGTKVEIKR

SEQ ID NO: 156 - protein, 247 aa, Artificial Sequence
  Description of Artificial Sequence: Synthetic polypeptide
EVQLVESGGGLVQPGGSLRLSCAASGFSLTNNNVNWVRQAPGKGLEWVGGVWAGGATDYNSALKSRFTISRDNSKNTAYLQMNSLRAEDTAVYYCARDGGYSSSTLYAMDAWGQGTLVTVSSASTKGPQVQLQESGPGLVKPSETLSLTCTVSGGSVSSGDYYWTWIRQSPGKGLEWIGHIYYSGNTNYNPSLKSRLTISIDTSKTQFSLKLSSVTAADTAIYYCVRDRVTGAFDIWGQGTMVTVSS

SEQ ID NO: 157 - protein, 221 aa, Artificial Sequence
  Description of Artificial Sequence: Synthetic polypeptide
DIQMTQSPSSLSASVGDRVTITCRASEDIYNALAWYQQKPGKAPKLLIYNTDTLHTGVPSRFSGSGSGTDYTLTISSLQPEDFATYFCQHYFHYPRTFGQGTKVEIKRTVAAPDIQMTQSPSSLSASVGDRVTITCQASQDISNYLNWYQQKPGKAPKLLIYDASNLETGVPSRFSGSGSGTDFTFTISSLQPEDIATYFCQHFDHLPLAFGGGTKVEIKR

SEQ ID NO: 158 - protein, 247 aa, Artificial Sequence
  Description of Artificial Sequence: Synthetic polypeptide
QVQLQESGPGLVKPSETLSLTCTVSGGSVSSGDYYWTWIRQSPGKGLEWIGHIYYSGNTNYNPSLKSRLTISIDTSKTQFSLKLSSVTAADTAIYYCVRDRVTGAFDIWGQGTMVTVSSASTKGPEVQLVESGGGLVQPGGSLRLSCAASGFSLTNNNVNWVRQAPGKGLEWVGGVWAGGATDYNSALKSRFTISRDNSKNTAYLQMNSLRAEDTAVYYCARDGGYSSSTLYAMDAWGQGTLVTVSS

SEQ ID NO: 159 - protein, 221 aa, Artificial Sequence
  Description of Artificial Sequence: Synthetic polypeptide
DIQMTQSPSSLSASVGDRVTITCQASQDISNYLNWYQQKPGKAPKLLIYDASNLETGVPSRFSGSGSGTDFTFTISSLQPEDIATYFCQHFDHLPLAFGGGTKVEIKRTVAAPDIQMTQSPSSLSASVGDRVTITCRASEDIYNALAWYQQKPGKAPKLLIYNTDTLHTGVPSRFSGSGSGTDYTLTISSLQPEDFATYFCQHYFHYPRTFGQGTKVEIKR

SEQ ID NO: 160 - protein, 248 aa, Artificial Sequence
  Description of Artificial Sequence: Synthetic polypeptide
EVQLVESGGGLVQPGGSLRLSCAASGFSLTNNNVNWVRQAPGKGLEWVGGVWAGGATDYNSALKSRFTISRDNSKNTAYLQMNSLRAEDTAVYYCARDGGYSSSTLYAMDAWGQGTLVTVSSASTKGPEVQLVESGGGLVQPGGSLRLSCAASGFNIKDTYIHWVRQAPGKGLEWVARIYPTNGYTRYADSVKGRFTISADTSKNTAYLQMNSLRAEDTAVYYCSRWGGDGFYAMDYWGQGTLVTVSS

SEQ ID NO: 161 - protein, 221 aa, Artificial Sequence
  Description of Artificial Sequence: Synthetic polypeptide
DIQMTQSPSSLSASVGDRVTITCRASEDIYNALAWYQQKPGKAPKLLIYNTDTLHTGVPSRFSGSGSGTDYTLTISSLQPEDFATYFCQHYFHYPRTFGQGTKVEIKRTVAAPDIQMTQSPSSLSASVGDRVTITCRASQDVNTAVAWYQQKPGKAPKLLIYSASFLYSGVPSRFSGSRSGTDFTLTISSLQPEDFATYYCQQHYTTPPTFGQGTKVEIKR

SEQ ID NO: 162 - protein, 248 aa, Artificial Sequence
  Description of Artificial Sequence: Synthetic polypeptide
EVQLVESGGGLVQPGGSLRLSCAASGFNIKDTYIHWVRQAPGKGLEWVARIYPTNGYTRYADSVKGRFTISADTSKNTAYLQMNSLRAEDTAVYYCSRWGGDGFYAMDYWGQGTLVTVSSASTKGPEVQLVESGGGLVQPGGSLRLSCAASGFSLTNNNVNWVRQAPGKGLEWVGGVWAGGATDYNSALKSRFTISRDNSKNTAYLQMNSLRAEDTAVYYCARDGGYSSSTLYAMDAWGQGTLVTVSS

SEQ ID NO: 163 - protein, 221 aa, Artificial Sequence
  Description of Artificial Sequence: Synthetic polypeptide
DIQMTQSPSSLSASVGDRVTITCRASQDVNTAVAWYQQKPGKAPKLLIYSASFLYSGVPSRFSGSRSGTDFTLTISSLQPEDFATYYCQQHYTTPPTFGQGTKVEIKRTVAAPDIQMTQSPSSLSASVGDRVTITCRASEDIYNALAWYQQKPGKAPKLLIYNTDTLHTGVPSRFSGSGSGTDYTLTISSLQPEDFATYFCQHYFHYPRTFGQGTKVEIKR

SEQ ID NO: 164 - protein, 252 aa, Artificial Sequence
  Description of Artificial Sequence: Synthetic polypeptide
EVQLVESGGGLVQPGGSLRLSCAASGFSLTNNNVNWVRQAPGKGLEWVGGVWAGGATDYNSALKSRFTISRDNSKNTAYLQMNSLRAEDTAVYYCARDGGYSSSTLYAMDAWGQGTLVTVSSASTKGPQVQLQQSGAELVRPGSSVKISCKASGYAFSSYWMNWVKQRPGQGLEWIGQIWPGDGDTNYNGKFKGKATLTADESSSTAYMQLSSLASEDSAVYFCARRETTTVGRYYYAMDYWGQGTSVTVSS

SEQ ID NO: 165 - protein, 225 aa, Artificial Sequence
  Description of Artificial Sequence: Synthetic polypeptide
DIQMTQSPSSLSASVGDRVTITCRASEDIYNALAWYQQKPGKAPKLLIYNTDTLHTGVPSRFSGSGSGTDYTLTISSLQPEDFATYFCQHYFHYPRTFGQGTKVEIKRTVAAPDILLTQTPASLAVSLGQRATISCKASQSVDYDGDSYLNWYQQIPGQPPKLLIYDASNLVSGIPPRFSGSGSGTDFTLNIHPVEKVDAATYHCQQSTEDPWTFGGGTKLEIKR

SEQ ID NO: 166 - protein, 252 aa, Artificial Sequence
  Description of Artificial Sequence: Synthetic polypeptide
QVQLQQSGAELVRPGSSVKISCKASGYAFSSYWMNWVKQRPGQGLEWIGQIWPGDGDTNYNGKFKGKATLTADESSSTAYMQLSSLASEDSAVYFCARRETTTVGRYYYAMDYWGQGTSVTVSSASTKGPEVQLVESGGGLVQPGGSLRLSCAASGFSLTNNNVNWVRQAPGKGLEWVGGVWAGGATDYNSALKSRFTISRDNSKNTAYLQMNSLRAEDTAVYYCARDGGYSSSTLYAMDAWGQGTLVTVSS

SEQ ID NO: 167 - protein, 225 aa, Artificial Sequence
  Description of Artificial Sequence: Synthetic polypeptide
DILLTQTPASLAVSLGQRATISCKASQSVDYDGDSYLNWYQQIPGQPPKLLIYDASNLVSGIPPRFSGSGSGTDFTLNIHPVEKVDAATYHCQQSTEDPWTFGGGTKLEIKRTVAAPDIQMTQSPSSLSASVGDRVTITCRASEDIYNALAWYQQKPGKAPKLLIYNTDTLHTGVPSRFSGSGSGTDYTLTISSLQPEDFATYFCQHYFHYPRTFGQGTKVEIKR

SEQ ID NO: 168 - protein, 255 aa, Artificial Sequence
  Description of Artificial Sequence: Synthetic polypeptide
EVQLVESGGGLVQPGGSLRLSCAASGFSLTNNNVNWVRQAPGKGLEWVGGVWAGGATDYNSALKSRFTISRDNSKNTAYLQMNSLRAEDTAVYYCARDGGYSSSTLYAMDAWGQGTLVTVSSASTKGPQVQLQESGPGLVKPSETLSLTCAVSGGSISGGYGWGWIRQPPGKGLEWIGSFYSSSGNTYYNPSLKSQVTISTDTSKNQFSLKLNSMTAADTAVYYCVRDRLFSVVGMVYNNWFDVWGPGVLVTVSS

SEQ ID NO: 169 - protein, 224 aa, Artificial Sequence
  Description of Artificial Sequence: Synthetic polypeptide
DIQMTQSPSSLSASVGDRVTITCRASEDIYNALAWYQQKPGKAPKLLIYNTDTLHTGVPSRFSGSGSGTDYTLTISSLQPEDFATYFCQHYFHYPRTFGQGTKVEIKRTVAAPESALTQPPSVSGAPGQKVTISCTGSTSNIGGYDLHWYQQLPGTAPKLLIYDINKRPSGISDRFSGSKSGTAASLAITGLQTEDEADYYCQSYDSSLNAQVFGGGTRLTVLG

SEQ ID NO: 170 - protein, 255 aa, Artificial Sequence
  Description of Artificial Sequence: Synthetic polypeptide
QVQLQESGPGLVKPSETLSLTCAVSGGSISGGYGWGWIRQPPGKGLEWIGSFYSSSGNTYYNPSLKSQVTISTDTSKNQFSLKLNSMTAADTAVYYCVRDRLFSVVGMVYNNWFDVWGPGVLVTVSSASTKGPEVQLVESGGGLVQPGGSLRLSCAASGFSLTNNNVNWVRQAPGKGLEWVGGVWAGGATDYNSALKSRFTISRDNSKNTAYLQMNSLRAEDTAVYYCARDGGYSSSTLYAMDAWGQGTLVTVSS

SEQ ID NO: 171 - protein, 225 aa, Artificial Sequence
  Description of Artificial Sequence: Synthetic polypeptide
ESALTQPPSVSGAPGQKVTISCTGSTSNIGGYDLHWYQQLPGTAPKLLIYDINKRPSGISDRFSGSKSGTAASLAITGLQTEDEADYYCQSYDSSLNAQVFGGGTRLTVLGQPKAAPDIQMTQSPSSLSASVGDRVTITCRASEDIYNALAWYQQKPGKAPKLLIYNTDTLHTGVPSRFSGSGSGTDYTLTISSLQPEDFATYFCQHYFHYPRTFGQGTKVEIKR

SEQ ID NO: 172 - protein, 244 aa, Artificial Sequence
  Description of Artificial Sequence: Synthetic polypeptide
EVQLVESGGGLVQPGGSLRLSCAASGFSLTNNNVNWVRQAPGKGLEWVGGVWAGGATDYNSALKSRFTISRDNSKNTAYLQMNSLRAEDTAVYYCARDGGYSSSTLYAMDAWGQGTLVTVSSASTKGPQVQLVQSGAEVKKPGSSVKVSCKASGYTFTSYWLHWVRQAPGQGLEWIGYINPRNDYTEYNQNFKDKATITADESTNTAYMELSSLRSEDTAFYFCARRDITTFYWGQGTTVTVSS

SEQ ID NO: 173 - protein, 226 aa, Artificial Sequence
  Description of Artificial Sequence: Synthetic polypeptide
DIQMTQSPSSLSASVGDRVTITCRASEDIYNALAWYQQKPGKAPKLLIYNTDTLHTGVPSRFSGSGSGTDYTLTISSLQPEDFATYFCQHYFHYPRTFGQGTKVEIKRTVAAPDIQLTQSPSSLSASVGDRVTMSCKSSQSVLYSANHKNYLAWYQQKPGKAPKLLIYWASTRESGVPSRFSGSGSGTDFTFTISSLQPEDIATYYCHQYLSSWTFGGGTKLEIKR

SEQ ID NO: 174 - protein, 244 aa, Artificial Sequence
  Description of Artificial Sequence: Synthetic polypeptide
QVQLVQSGAEVKKPGSSVKVSCKASGYTFTSYWLHWVRQAPGQGLEWIGYINPRNDYTEYNQNFKDKATITADESTNTAYMELSSLRSEDTAFYFCARRDITTFYWGQGTTVTVSSASTKGPEVQLVESGGGLVQPGGSLRLSCAASGFSLTNNNVNWVRQAPGKGLEWVGGVWAGGATDYNSALKSRFTISRDNSKNTAYLQMNSLRAEDTAVYYCARDGGYSSSTLYAMDAWGQGTLVTVSS

SEQ ID NO: 175 - protein, 226 aa, Artificial Sequence
  Description of Artificial Sequence: Synthetic polypeptide
DIQLTQSPSSLSASVGDRVTMSCKSSQSVLYSANHKNYLAWYQQKPGKAPKLLIYWASTRESGVPSRFSGSGSGTDFTFTISSLQPEDIATYYCHQYLSSWTFGGGTKLEIKRTVAAPDIQMTQSPSSLSASVGDRVTITCRASEDIYNALAWYQQKPGKAPKLLIYNTDTLHTGVPSRFSGSGSGTDYTLTISSLQPEDFATYFCQHYFHYPRTFGQGTKVEIKR

SEQ ID NO: 176 - protein, 248 aa, Artificial Sequence
  Description of Artificial Sequence: Synthetic polypeptide
EVQLVESGGGLVQPGGSLRLSCAASGFSLTNNNVNWVRQAPGKGLEWVGGVWAGGATDYNSALKSRFTISRDNSKNTAYLQMNSLRAEDTAVYYCARDGGYSSSTLYAMDAWGQGTLVTVSSASTKGPQVQLVESGGGVVQPGRSLRLSCAASGFTFSSYGMHWVRQAPGKGLEWVAVISYEESNRYHADSVKGRFTISRDNSKITLYLQMNSLRTEDTAVYYCARDGGIAAPGPDYWGQGTLVTVSS

SEQ ID NO: 177 - protein, 226 aa, Artificial Sequence
  Description of Artificial Sequence: Synthetic polypeptide
DIQMTQSPSSLSASVGDRVTITCRASEDIYNALAWYQQKPGKAPKLLIYNTDTLHTGVPSRFSGSGSGTDYTLTISSLQPEDFATYFCQHYFHYPRTFGQGTKVEIKRTVAAPDIVMTQSPLSLTVTPGEPASISCRSSQSLLYSNGYNYLDWYLQKPGQSPQVLISLGSNRASGVPDRFSGSGSGTDFTLKISRVEAEDVGVYYCMQARQTPFTFGPGTKVDIRR

SEQ ID NO: 178 - protein, 248 aa, Artificial Sequence
  Description of Artificial Sequence: Synthetic polypeptide
QVQLVESGGGVVQPGRSLRLSCAASGFTFSSYGMHWVRQAPGKGLEWVAVISYEESNRYHADSVKGRFTISRDNSKITLYLQMNSLRTEDTAVYYCARDGGIAAPGPDYWGQGTLVTVSSASTKGPEVQLVESGGGLVQPGGSLRLSCAASGFSLTNNNVNWVRQAPGKGLEWVGGVWAGGATDYNSALKSRFTISRDNSKNTAYLQMNSLRAEDTAVYYCARDGGYSSSTLYAMDAWGQGTLVTVSS

SEQ ID NO: 179 - protein, 226 aa, Artificial Sequence
  Description of Artificial Sequence: Synthetic polypeptide
DIVMTQSPLSLTVTPGEPASISCRSSQSLLYSNGYNYLDWYLQKPGQSPQVLISLGSNRASGVPDRFSGSGSGTDFTLKISRVEAEDVGVYYCMQARQTPFTFGPGTKVDIRRTVAAPDIQMTQSPSSLSASVGDRVTITCRASEDIYNALAWYQQKPGKAPKLLIYNTDTLHTGVPSRFSGSGSGTDYTLTISSLQPEDFATYFCQHYFHYPRTFGQGTKVEIKR

SEQ ID NO: 180 - protein, 249 aa, Artificial Sequence
  Description of Artificial Sequence: Synthetic polypeptide
EVQLVESGGGLVQPGGSLRLSCAASGFSLTNNNVNWVRQAPGKGLEWVGGVWAGGATDYNSALKSRFTISRDNSKNTAYLQMNSLRAEDTAVYYCARDGGYSSSTLYAMDAWGQGTLVTVSSASTKGPQVQLQQSGPELVRPGASVKWSCPASGYTFTSYWLHWVKKQRPGQGLEWIGMIDPSNSDTRFNPPNFKDKATLNVDRSSNTAYNLLSSLTSADSAVYYCATYGSYVSPLDYWGQGTSVYVSS

SEQ ID NO: 181 - protein, 227 aa, Artificial Sequence
  Description of Artificial Sequence: Synthetic polypeptide
DIQMTQSPSSLSASVGDRVTITCRASEDIYNALAWYQQKPGKAPKLLIYNTDTLHTGVPSRFSGSGSGTDYTLTISSLQPEDFATYFCQHYFHYPRTFGQGTKVEIKRTVAAPDIMMSQSPSSLTVSVGEKVTVSCKSSQSLLVTSSQKNYLAWYQQKPQQSPKLLIYWASTRESGVPDRFTGSGSGTDFTLTITSVKADDLAVYYCQQYYAYPWTFGDGTKLEIKR

SEQ ID NO: 182 - protein, 249 aa, Artificial Sequence
  Description of Artificial Sequence: Synthetic polypeptide
QVQLQQSGPELVRPGASVKWSCPASGYTFTSYWLHWVKKQRPGQGLEWIGMIDPSNSDTRFNPPNFKDKATLNVDRSSNTAYNLLSSLTSADSAVYYCATYGSYVSPLDYWGQGTSVYVSSASTKGPEVQLVESGGGLVQPGGSLRLSCAASGFSLTNNNVNWVRQAPGKGLEWVGGVWAGGATDYNSALKSRFTISRDNSKNTAYLQMNSLRAEDTAVYYCARDGGYSSSTLYAMDAWGQGTLVTVSS

SEQ ID NO: 183 - protein, 227 aa, Artificial Sequence
  Description of Artificial Sequence: Synthetic polypeptide
DIMMSQSPSSLTVSVGEKVTVSCKSSQSLLVTSSQKNYLAWYQQKPQQSPKLLIYWASTRESGVPDRFTGSGSGTDFTLTITSVKADDLAVYYCQQYYAYPWTFGDGTKLEIKRTVAAPDIQMTQSPSSLSASVGDRVTITCRASEDIYNALAWYQQKPGKAPKLLIYNTDTLHTGVPSRFSGSGSGTDYTLTISSLQPEDFATYFCQHYFHYPRTFGQGTKVEIKR

SEQ ID NO: 184 - protein, 247 aa, Artificial Sequence
  Description of Artificial Sequence: Synthetic polypeptide
EVQLVESGGGLVQPGGSLRLSCAASGFSLTNNNVNWVRQAPGKGLEWVGGVWAGGATDYNSALKSRFTISRDNSKNTAYLQMNSLRAEDTAVYYCARDGGYSSSTLYAMDAWGQGTLVTVSSASTKGPEVQLVESGGGLVQPGGSLRLSCAASGFSFSSEPISWVRQAPGKGLEWVSSITGKNGYTYYADSVKGRFTISADTSKNTAYLQMNSLRAEDTAVYYCARWGKKVYGMDVWGQGTLVTVSS

SEQ ID NO: 185 - protein, 221 aa, Artificial Sequence
  Description of Artificial Sequence: Synthetic polypeptide
DIQMTQSPSSLSASVGDRVTITCRASEDIYNALAWYQQKPGKAPKLLIYNTDTLHTGVPSRFSGSGSGTDYTLTISSLQPEDFATYFCQHYFHYPRTFGQGTKVEIKRTVAAPDIQMTQSPSSLSASVGDRVTITCRASQSISSYLAWYQQKPGKAPKLLIYGASSRASGVPSRFSGSGSGTDFTLTISSLQPEDFATYYCQQYMSVPITFGQGTKVEIKR

SEQ ID NO: 186 - protein, 247 aa, Artificial Sequence
  Description of Artificial Sequence: Synthetic polypeptide
EVQLVESGGGLVQPGGSLRLSCAASGFSFSSEPISWVRQAPGKGLEWVSSITGKNGYTYYADSVKGRFTISADTSKNTAYLQMNSLRAEDTAVYYCARWGKKVYGMDVWGQGTLVTVSSASTKGPEVQLVESGGGLVQPGGSLRLSCAASGFSLTNNNVNWVRQAPGKGLEWVGGVWAGGATDYNSALKSRFTISRDNSKNTAYLQMNSLRAEDTAVYYCARDGGYSSSTLYAMDAWGQGTLVTVSS

SEQ ID NO: 187 - protein, 221 aa, Artificial Sequence
  Description of Artificial Sequence: Synthetic polypeptide
DIQMTQSPSSLSASVGDRVTITCRASQSISSYLAWYQQKPGKAPKLLIYGASSRASGVPSRFSGSGSGTDFTLTISSLQPEDFATYYCQQYMSVPITFGQGTKVEIKRTVAAPDIQMTQSPSSLSASVGDRVTITCRASEDIYNALAWYQQKPGKAPKLLIYNTDTLHTGVPSRFSGSGSGTDYTLTISSLQPEDFATYFCQHYFHYPRTFGQGTKVEIKR

SEQ ID NO: 188 - protein, 250 aa, Artificial Sequence
  Description of Artificial Sequence: Synthetic polypeptide
EVQLVESGGGLVQPGGSLRLSCAASGFSLTNNNVNWVRQAPGKGLEWVGGVWAGGATDYNSALKSRFTISRDNSKNTAYLQMNSLRAEDTAVYYCARDGGYSSSTLYAMDAWGQGTLVTVSSASTKGPEVQLVESGGGLVQPGGSLRLSCAASGFTFSSYAMSWVRQAPGKGLEWVSQISPAGGYTNYADSVKGRFTISADTSKNTAYLQMNSLRAEDTAVYYCARELPYYRMSKVMDVQGQGTLVTVSS

SEQ ID NO: 189 - protein, 221 aa, Artificial Sequence
  Description of Artificial Sequence: Synthetic polypeptide
DIQMTQSPSSLSASVGDRVTITCRASEDIYNALAWYQQKPGKAPKLLIYNTDTLHTGVPSRFSGSGSGTDYTLTISSLQPEDFATYFCQHYFHYPRTFGQGTKVEIKRTVAAPDIQMTQSPSSLSASVGDRVTITCRASQYFSSYLAWYQQKPGKAPKLLIYGASSRASGVPSRFSGSGSGTDFTLTISSLQPEDFATYYCQQYLGSPPTFGQGTKVEIKR

SEQ ID NO: 190 - protein, 250 aa, Artificial Sequence
  Description of Artificial Sequence: Synthetic polypeptide
EVQLVESGGGLVQPGGSLRLSCAASGFTFSSYAMSWVRQAPGKGLEWVSQISPAGGYTNYADSVKGRFTISADTSKNTAYLQMNSLRAEDTAVYYCARELPYYRMSKVMDVQGQGTLVTVSSASTKGPEVQLVESGGGLVQPGGSLRLSCAASGFSLTNNNVNWVRQAPGKGLEWVGGVWAGGATDYNSALKSRFTISRDNSKNTAYLQMNSLRAEDTAVYYCARDGGYSSSTLYAMDAWGQGTLVTVSS

SEQ ID NO: 191 - protein, 221 aa, Artificial Sequence
  Description of Artificial Sequence: Synthetic polypeptide
DIQMTQSPSSLSASVGDRVTITCRASQYFSSYLAWYQQKPGKAPKLLIYGASSRASGVPSRFSGSGSGTDFTLTISSLQPEDFATYYCQQYLGSPPTFGQGTKVEIKRTVAAPDIQMTQSPSSLSASVGDRVTITCRASEDIYNALAWYQQKPGKAPKLLIYNTDTLHTGVPSRFSGSGSGTDYTLTISSLQPEDFATYFCQHYFHYPRTFGQGTKVEIKR

SEQ ID NO: 192 - protein, 247 aa, Artificial Sequence; identical to SEQ ID NO: 124
  Description of Artificial Sequence: Synthetic polypeptide

SEQ ID NO: 193 - protein, 220 aa, Artificial Sequence
  Description of Artificial Sequence: Synthetic polypeptide
DIQMTQSPSSLSASVGDRVTITCRASEDIYNALAWYQQKPGKAPKLLIYNTDTLHTGVPSRFSGSGSGTDYTLTISSLQPEDFATYFCQHYFHYPRTFGQGTKVEIKRTVAAPQIVLTQSPAIMSASPGEKVTMTCSASSSVSYMNWYQQKSGTSPKRWIYDTSKLASGVPAHFRGSGSGTSYSLTISGMEAEDAATYYCQQWSSNPFTFGSGTKLEINR

SEQ ID NO: 194 - protein, 247 aa, Artificial Sequence; identical to SEQ ID NO: 126
  Description of Artificial Sequence: Synthetic polypeptide

SEQ ID NO: 195 - protein, 220 aa, Artificial Sequence
  Description of Artificial Sequence: Synthetic polypeptide
QIVLTQSPAIMSASPGEKVTMTCSASSSVSYMNWYQQKSGTSPKRWIYDTSKLASGVPAHFRGSGSGTSYSLTISGMEAEDAATYYCQQWSSNPFTFGSGTKLEINRTVAAPDIQMTQSPSSLSASVGDRVTITCRASEDIYNALAWYQQKPGKAPKLLIYNTDTLHTGVPSRFSGSGSGTDYTLTISSLQPEDFATYFCQHYFHYPRTFGQGTKVEIKR

SEQ ID NO: 196 - protein, 247 aa, Artificial Sequence
  Description of Artificial Sequence: Synthetic polypeptide
EVQLVESGGGLVQPGGSLRLSCAASGFSLTNNNVNWVRQAPGKGLEWVGGVWAGGATDYNSALKSRFTISRDNSKNTAYLQMNSLRAEDTAVYYCARDGGYSSSTLYAMDAWGQGTLVTVSSASTKGPEVQLLESGGGLVQPGGSLRLSCAASGFTFSHYVMAWVRQAPGKGLEWVSSISSSGGWTLYADSVKGRFTISRDNSKNTLYLQMNSLRAEDTAVYYCTRGLKMATIFDYWGQGTLVTVSS

SEQ ID NO: 197 - protein, 225 aa, Artificial Sequence
  Description of Artificial Sequence: Synthetic polypeptide
DIQMTQSPSSLSASVGDRVTITCRASEDIYNALAWYQQKPGKAPKLLIYNTDTLHTGVPSRFSGSGSGTDYTLTISSLQPEDFATYFCQHYFHYPRTFGQGTKVEIKRTVAAPQSALTQPASVSGSPGQSITISCTGTSSDVGSYNVVSWYQQHPGKAPKLIIYEVSQRPSGVSNRFSGSKSGNTASLTISGLQTEDEADYYCCSYAGSSIFVIFGGGTKVTVLG

SEQ ID NO: 198 - protein, 247 aa, Artificial Sequence
  Description of Artificial Sequence: Synthetic polypeptide
EVQLLESGGGLVQPGGSLRLSCAASGFTFSHYVMAWVRQAPGKGLEWVSSISSSGGWTLYADSVKGRFTISRDNSKNTLYLQMNSLRAEDTAVYYCTRGLKMATIFDYWGQGTLVTVSSASTKGPEVQLVESGGGLVQPGGSLRLSCAASGFSLTNNNVNWVRQAPGKGLEWVGGVWAGGATDYNSALKSRFTISRDNSKNTAYLQMNSLRAEDTAVYYCARDGGYSSSTLYAMDAWGQGTLVTVSS

SEQ ID NO: 199 - protein, 226 aa, Artificial Sequence
  Description of Artificial Sequence: Synthetic polypeptide
QSALTQPASVSGSPGQSITISCTGTSSDVGSYNVVSWYQQHPGKAPKLIIYEVSQRPSGVSNRFSGSKSGNTASLTISGLQTEDEADYYCCSYAGSSIFVIFGGGTKVTVLGQPKAAPDIQMTQSPSSLSASVGDRVTITCRASEDIYNALAWYQQKPGKAPKLLIYNTDTLHTGVPSRFSGSGSGTDYTLTISSLQPEDFATYFCQHYFHYPRTFGQGTKVEIKR

SEQ ID NO: 200 - protein, 248 aa, Artificial Sequence
  Description of Artificial Sequence: Synthetic polypeptide
EVQLVESGGGLVQPGGSLRLSCAASGFSLTNNNVNWVRQAPGKGLEWVGGVWAGGATDYNSALKSRFTISRDNSKNTAYLQMNSLRAEDTAVYYCARDGGYSSSTLYAMDAWGQGTLVTVSSASTKGPEVQLVESGGGLVQPGGSLRLSCAASGFTISDYWIHWVRQAPGKGLEWVAGITPAGGYTYYADSVKGRFTISADTSKNTAYLQMNSLRAEDTAVYYCARFVFFLPYAMDYWGQGTLVTVSS

SEQ ID NO: 201 - protein, 221 aa, Artificial Sequence
  Description of Artificial Sequence: Synthetic polypeptide
DIQMTQSPSSLSASVGDRVTITCRASEDIYNALAWYQQKPGKAPKLLIYNTDTLHTGVPSRFSGSGSGTDYTLTISSLQPEDFATYFCQHYFHYPRTFGQGTKVEIKRTVAAPDIQMTQSPSSLSASVGDRVTITCRASQDVSTAVAWYQQKPGKAPKLLIYSASFLYSGVPSRFSGSGSGTDFTLTISSLQPEDFATYYCQQSYTTPPTFGQGTKVEIKR

SEQ ID NO: 202 - protein, 248 aa, Artificial Sequence
  Description of Artificial Sequence: Synthetic polypeptide
EVQLVESGGGLVQPGGSLRLSCAASGFTISDYWIHWVRQAPGKGLEWVAGITPAGGYTYYADSVKGRFTISADTSKNTAYLQMNSLRAEDTAVYYCARFVFFLPYAMDYWGQGTLVTVSSASTKGPEVQLVESGGGLVQPGGSLRLSCAASGFSLTNNNVNWVRQAPGKGLEWVGGVWAGGATDYNSALKSRFTISRDNSKNTAYLQMNSLRAEDTAVYYCARDGGYSSSTLYAMDAWGQGTLVTVSS

SEQ ID NO: 203 - protein, 221 aa, Artificial Sequence
  Description of Artificial Sequence: Synthetic polypeptide
DIQMTQSPSSLSASVGDRVTITCRASQDVSTAVAWYQQKPGKAPKLLIYSASFLYSGVPSRFSGSGSGTDFTLTISSLQPEDFATYYCQQSYTTPPTFGQGTKVEIKRTVAAPDIQMTQSPSSLSASVGDRVTITCRASEDIYNALAWYQQKPGKAPKLLIYNTDTLHTGVPSRFSGSGSGTDYTLTISSLQPEDFATYFCQHYFHYPRTFGQGTKVEIKR

SEQ ID NO: 204 - protein, 249 aa, Artificial Sequence
  Description of Artificial Sequence: Synthetic polypeptide
EVQLVESGGGLVQPGGSLRLSCAASGFSLTNNNVNWVRQAPGKGLEWVGGVWAGGATDYNSALKSRFTISRDNSKNTAYLQMNSLRAEDTAVYYCARDGGYSSSTLYAMDAWGQGTLVTVSSASTKGPEVQLVESGGGLVQPGGSLRLSCAASGFTINASWIHWVRQAPGKGLEWVGAIYPYSGYTNYADSVKGRFTISADTSKNTAYLQMNSLRAEDTAVYYCARWGHSTSPWAMDYWGQGTLVTVSS

SEQ ID NO: 205 - protein, 221 aa, Artificial Sequence
  Description of Artificial Sequence: Synthetic polypeptide
DIQMTQSPSSLSASVGDRVTITCRASEDIYNALAWYQQKPGKAPKLLIYNTDTLHTGVPSRFSGSGSGTDYTLTISSLQPEDFATYFCQHYFHYPRTFGQGTKVEIKRTVAAPDIQMTQSPSSLSASVGDRVTITCRASQVIRRSLAWYQQKPGKAPKLLIYAASNLASGVPSRFSGSGSGTDFTLTISSLQPEDFATYYCQQSNTSPLTFGQGTKVEIKR

SEQ ID NO: 206 - protein, 249 aa, Artificial Sequence
  Description of Artificial Sequence: Synthetic polypeptide
EVQLVESGGGLVQPGGSLRLSCAASGFTINASWIHWVRQAPGKGLEWVGAIYPYSGYTNYADSVKGRFTISADTSKNTAYLQMNSLRAEDTAVYYCARWGHSTSPWAMDYWGQGTLVTVSSASTKGPEVQLVESGGGLVQPGGSLRLSCAASGFSLTNNNVNWVRQAPGKGLEWVGGVWAGGATDYNSALKSRFTISRDNSKNTAYLQMNSLRAEDTAVYYCARDGGYSSSTLYAMDAWGQGTLVTVSS

SEQ ID NO: 207 - protein, 221 aa, Artificial Sequence
  Description of Artificial Sequence: Synthetic polypeptide
DIQMTQSPSSLSASVGDRVTITCRASQVIRRSLAWYQQKPGKAPKLLIYAASNLASGVPSRFSGSGSGTDFTLTISSLQPEDFATYYCQQSNTSPLTFGQGTKVEIKRTVAAPDIQMTQSPSSLSASVGDRVTITCRASEDIYNALAWYQQKPGKAPKLLIYNTDTLHTGVPSRFSGSGSGTDYTLTISSLQPEDFATYFCQHYFHYPRTFGQGTKVEIKR

SEQ ID NO: 208 - protein, 251 aa, Artificial Sequence
  Description of Artificial Sequence: Synthetic polypeptide
EVQLVESGGGLVQPGGSLRLSCAASGFSLTNNNVNWVRQAPGKGLEWVGGVWAGGATDYNSALKSRFTISRDNSKNTAYLQMNSLRAEDTAVYYCARDGGYSSSTLYAMDAWGQGTLVTVSSASTKGPEVQLVESGGGLVQPGGSLRLSCAASGYDFTHYGMNWVRQAPGKGLEWVGWINTYTGEPTYAADFKRRFTFSLDTSKSTAYLQMNSLRAEDTAVYYCAKYPYYYGTSHWYFDVWGQGTLVTVSS

SEQ ID NO: 209 - protein, 221 aa, Artificial Sequence
  Description of Artificial Sequence: Synthetic polypeptide
DIQMTQSPSSLSASVGDRVTITCRASEDIYNALAWYQQKPGKAPKLLIYNTDTLHTGVPSRFSGSGSGTDYTLTISSLQPEDFATYFCQHYFHYPRTFGQGTKVEIKRTVAAPDIQLTQSPSSLSASVGDRVTITCSASQDISNYLNWYQQKPGKAPKVLIYFTSSLHSGVPSRFSGSGSGTDFTLTISSLQPEDFATYYCQQYSTVPWTFGQGTKVEIKR

SEQ ID NO: 210 - protein, 251 aa, Artificial Sequence
  Description of Artificial Sequence: Synthetic polypeptide
EVQLVESGGGLVQPGGSLRLSCAASGYDFTHYGMNWVRQAPGKGLEWVGWINTYTGEPTYAADFKRRFTFSLDTSKSTAYLQMNSLRAEDTAVYYCAKYPYYYGTSHWYFDVWGQGTLVTVSSASTKGPEVQLVESGGGLVQPGGSLRLSCAASGFSLTNNNVNWVRQAPGKGLEWVGGVWAGGATDYNSALKSRFTISRDNSKNTAYLQMNSLRAEDTAVYYCARDGGYSSSTLYAMDAWGQGTLVTVSS

SEQ ID NO: 211 - protein, 221 aa, Artificial Sequence
  Description of Artificial Sequence: Synthetic polypeptide
DIQLTQSPSSLSASVGDRVTITCSASQDISNYLNWYQQKPGKAPKVLIYFTSSLHSGVPSRFSGSGSGTDFTLTISSLQPEDFATYYCQQYSTVPWTFGQGTKVEIKRTVAAPDIQMTQSPSSLSASVGDRVTITCRASEDIYNALAWYQQKPGKAPKLLIYNTDTLHTGVPSRFSGSGSGTDYTLTISSLQPEDFATYFCQHYFHYPRTFGQGTKVEIKR

SEQ ID NO: 212 - protein, 244 aa, Artificial Sequence
  Description of Artificial Sequence: Synthetic polypeptide
EVQLVESGGGLVQPGGSLRLSCAASGFSLTNNNVNWVRQAPGKGLEWVGGVWAGGATDYNSALKSRFTISRDNSKNTAYLQMNSLRAEDTAVYYCARDGGYSSSTLYAMDAWGQGTLVTVSSASTKGPQVQLQESGPGLVKPSQTLSLTCTVSGYSISSDFAWNWIRQPPGKGLEWMGYISYSGNTRYQPSLKSRITISRDTSKNQFFLKLNSVTAADTATYYCVTAGRGFPYWGQGTLVTVSS

SEQ ID NO: 213 - protein, 221 aa, Artificial Sequence
  Description of Artificial Sequence: Synthetic polypeptide
DIQMTQSPSSLSASVGDRVTITCRASEDIYNALAWYQQKPGKAPKLLIYNTDTLHTGVPSRFSGSGSGTDYTLTISSLQPEDFATYFCQHYFHYPRTFGQGTKVEIKRTVAAPDIQMTQSPSSMSVSVGDRVTITCHSSQDINSNIGWLQQKPGKSFKGLIYHGTNLDDGVPSRFSGSGSGTDYTLTISSLQPEDFATYYCVQYAQFPWTFGGGTKLEIKR

SEQ ID NO: 214 - protein, 244 aa, Artificial Sequence
  Description of Artificial Sequence: Synthetic polypeptide
QVQLQESGPGLVKPSQTLSLTCTVSGYSISSDFAWNWIRQPPGKGLEWMGYISYSGNTRYQPSLKSRITISRDTSKNQFFLKLNSVTAADTATYYCVTAGRGFPYWGQGTLVTVSSASTKGPEVQLVESGGGLVQPGGSLRLSCAASGFSLTNNNVNWVRQAPGKGLEWVGGVWAGGATDYNSALKSRFTISRDNSKNTAYLQMNSLRAEDTAVYYCARDGGYSSSTLYAMDAWGQGTLVTVSS

SEQ ID NO: 215 - protein, 221 aa, Artificial Sequence
  Description of Artificial Sequence: Synthetic polypeptide
DIQMTQSPSSMSVSVGDRVTITCHSSQDINSNIGWLQQKPGKSFKGLIYHGTNLDDGVPSRFSGSGSGTDYTLTISSLQPEDFATYYCVQYAQFPWTFGGGTKLEIKRTVAAPDIQMTQSPSSLSASVGDRVTITCRASEDIYNALAWYQQKPGKAPKLLIYNTDTLHTGVPSRFSGSGSGTDYTLTISSLQPEDFATYFCQHYFHYPRTFGQGTKVEIKR

SEQ ID NO: 216 - protein, 243 aa, Artificial Sequence
  Description of Artificial Sequence: Synthetic polypeptide
QVQLQESGPGLVKPSETLSLTCTVSGFSLIGYDLNWIRQPPGKGLEWIGIIWGDGTTDYNSAVKSRVTISKDTSKNQFSLKLSSVTAADTAVYYCARGGYWYATSYYFDYWGQGTLVTVSSASTKGPDVQLQESGPGLVKPSQSLSLTCTVTGFSITSPYAWNWIRQFPGNTLEWMGYISYRGSTTHHPSLKSRISITRDTSKNQFFLQLNSVTTEDTATYFCSSYGNYGAYSGQGTLVTVSA

SEQ ID NO: 217 - protein, 226 aa, Artificial Sequence
  Description of Artificial Sequence: Synthetic polypeptide
DIQMTQSPSSLSASVGDRVTITCRASQSISNNLNWYQQKPGKAPKLLIYYTSRFHSGVPSRFSGSGSGTDFTFTISSLQPEDIATYYCQQEHTLPYTFGQGTKLEIKRTVAAPDVLLTQIPLSLPVSLGDQASISCRSSQSIVHSNGNTYLEWYLQKPGQSPKLLIYKVSTRFSGVPDRFSGSGSGTDFTLKISRVEAEDLGVYYCFQGSHVPLTFGAGTQLELKR

SEQ ID NO: 218 - protein, 243 aa, Artificial Sequence
  Description of Artificial Sequence: Synthetic polypeptide
DVQLQESGPGLVKPSQSLSLTCTVTGFSITSPYAWNWIRQFPGNTLEWMGYISYRGSTTHHPSLKSRISITRDTSKNQFFLQLNSVTTEDTATYFCSSYGNYGAYSGQGTLVTVSAASTKGPQVQLQESGPGLVKPSETLSLTCTVSGFSLIGYDLNWIRQPPGKGLEWIGIIWGDGTTDYNSAVKSRVTISKDTSKNQFSLKLSSVTAADTAVYYCARGGYWYATSYYFDYWGQGTLVTVSS

SEQ ID NO: 219 - protein, 226 aa, Artificial Sequence
  Description of Artificial Sequence: Synthetic polypeptide
DVLLTQIPLSLPVSLGDQASISCRSSQSIVHSNGNTYLEWYLQKPGQSPKLLIYKVSTRFSGVPDRFSGSGSGTDFTLKISRVEAEDLGVYYCFQGSHVPLTFGAGTQLELKRTVAAPDIQMTQSPSSLSASVGDRVTITCRASQSISNNLNWYQQKPGKAPKLLIYYTSRFHSGVPSRFSGSGSGTDFTFTISSLQPEDIATYYCQQEHTLPYTFGQGTKLEIKR

SEQ ID NO: 220 - protein, 248 aa, Artificial Sequence
  Description of Artificial Sequence: Synthetic polypeptide
QVQLQESGPGLVKPSETLSLTCTVSGFSLIGYDLNWIRQPPGKGLEWIGIIWGDGTTDYNSAVKSRVTISKDTSKNQFSLKLSSVTAADTAVYYCARGGYWYATSYYFDYWGQGTLVTVSSASTKGPQVQLVESGGGLVKPGGSLRLSCAASGFTFSSYGMHWVRQAPGKGLEWVAFIRYDGSNKYYADSVKGRFTISRDNSKNTLYLQMNSLRAEDTAVYYCAKDRGLGDGTYFDYWGQGTTVTVSS

SEQ ID NO: 221 - protein, 224 aa, Artificial Sequence
  Description of Artificial Sequence: Synthetic polypeptide
DIQMTQSPSSLSASVGDRVTITCRASQSISNNLNWYQQKPGKAPKLLIYYTSRFHSGVPSRFSGSGSGTDFTFTISSLQPEDIATYYCQQEHTLPYTFGQGTKLEIKRTVAAPQSALTQPASVSGSPGQSITISCSGSSSNIGNNAVNWYQQLPGKAPKLLIYYDDLLPSGVSDRFSGSKSGTSAFLAISGLQSEDEADYYCAAWDDSLNGPVFGGGTKLTVLG

SEQ ID NO: 222 - protein, 248 aa, Artificial Sequence
  Description of Artificial Sequence: Synthetic polypeptide
QVQLVESGGGLVKPGGSLRLSCAASGFTFSSYGMHWVRQAPGKGLEWVAFIRYDGSNKYYADSVKGRFTISRDNSKNTLYLQMNSLRAEDTAVYYCAKDRGLGDGTYFDYWGQGTTVTVSSASTKGPQVQLQESGPGLVKPSETLSLTCTVSGFSLIGYDLNWIRQPPGKGLEWIGIIWGDGTTDYNSAVKSRVTISKDTSKNQFSLKLSSVTAADTAVYYCARGGYWYATSYYFDYWGQGTLVTVSS

SEQ ID NO: 223 - protein, 225 aa, Artificial Sequence
  Description of Artificial Sequence: Synthetic polypeptide
QSALTQPASVSGSPGQSITISCSGSSSNIGNNAVNWYQQLPGKAPKLLIYYDDLLPSGVSDRFSGSKSGTSAFLAISGLQSEDEADYYCAAWDDSLNGPVFGGGTKLTVLGQPKAAPDIQMTQSPSSLSASVGDRVTITCRASQSISNNLNWYQQKPGKAPKLLIYYTSRFHSGVPSRFSGSGSGTDFTFTISSLQPEDIATYYCQQEHTLPYTFGQGTKLEIKR

SEQ ID NO: 224 - protein, 246 aa, Artificial Sequence
  Description of Artificial Sequence: Synthetic polypeptide
QVQLQESGPGLVKPSETLSLTCTVSGFSLIGYDLNWIRQPPGKGLEWIGIIWGDGTTDYNSAVKSRVTISKDTSKNQFSLKLSSVTAADTAVYYCARGGYWYATSYYFDYWGQGTLVTVSSASTKGPQVQLKQSGPGLVQPSQSLSITCTVSGFSLTNYGVHWVRQSPGKGLEWLGVIWSGGNTDYNTPFTSRLSINKDNSKSQVFFKMNSLQSNDTAIYYCARALTYYDYEFAYWGQGTLVTVSA

SEQ ID NO: 225 - protein, 221 aa, Artificial Sequence
  Description of Artificial Sequence: Synthetic polypeptide
DIQMTQSPSSLSASVGDRVTITCRASQSISNNLNWYQQKPGKAPKLLIYYTSRFHSGVPSRFSGSGSGTDFTFTISSLQPEDIATYYCQQEHTLPYTFGQGTKLEIKRTVAAPDILLTQSPVILSVSPGERVSFSCRASQSIGTNIHWYQQRTNGSPRLLIKYASESISGIPSRFSGSGSGTDFTLSINSVESEDIADYYCQQNNNWPTTFGAGTKLELKR

SEQ ID NO: 226 - protein, 246 aa, Artificial Sequence
  Description of Artificial Sequence: Synthetic polypeptide
QVQLKQSGPGLVQPSQSLSITCTVSGFSLTNYGVHWVRQSPGKGLEWLGVIWSGGNTDYNTPFTSRLSINKDNSKSQVFFKMNSLQSNDTAIYYCARALTYYDYEFAYWGQGTLVTVSAASTKGPQVQLQESGPGLVKPSETLSLTCTVSGFSLIGYDLNWIRQPPGKGLEWIGIIWGDGTTDYNSAVKSRVTISKDTSKNQFSLKLSSVTAADTAVYYCARGGYWYATSYYFDYWGQGTLVTVSS

SEQ ID NO: 227 - protein, 221 aa, Artificial Sequence
  Description of Artificial Sequence: Synthetic polypeptide
DILLTQSPVILSVSPGERVSFSCRASQSIGTNIHWYQQRTNGSPRLLIKYASESISGIPSRFSGSGSGTDFTLSINSVESEDIADYYCQQNNNWPTTFGAGTKLELKRTVAAPDIQMTQSPSSLSASVGDRVTITCRASQSISNNLNWYQQKPGKAPKLLIYYTSRFHSGVPSRFSGSGSGTDFTFTISSLQPEDIATYYCQQEHTLPYTFGQGTKLEIKR

SEQ ID NO: 228 - protein, 247 aa, Artificial Sequence
  Description of Artificial Sequence: Synthetic polypeptide
QVQLQESGPGLVKPSETLSLTCTVSGFSLIGYDLNWIRQPPGKGLEWIGIIWGDGTTDYNSAVKSRVTISKDTSKNQFSLKLSSVTAADTAVYYCARGGYWYATSYYFDYWGQGTLVTVSSASTKGPQVQLVQSGAEVKKPGASVKVSCKASGYTFTSYDINWVRQATGQGLEWMGWMNPNSGNTGYAQKFQGRVTMTRNTSISTAYMELSSLRSEDTAVYYCARDPYYYYYGMDVWGQGTTVTVSS

SEQ ID NO: 229 - protein, 225 aa, Artificial Sequence
  Description of Artificial Sequence: Synthetic polypeptide
DIQMTQSPSSLSASVGDRVTITCRASQSISNNLNWYQQKPGKAPKLLIYYTSRFHSGVPSRFSGSGSGTDFTFTISSLQPEDIATYYCQQEHTLPYTFGQGTKLEIKRTVAAPQSVLTQPPSVSAAPGQKVTISCSGSSSNIENNHVSWYQQLPGTAPKLLIYDNNKRPSGIPDRFSGSKSGTSATLGITGLQTGDEADYYCETWDTSLSAGRVFGGGTKLTVLG

SEQ ID NO: 230 - protein, 247 aa, Artificial Sequence
  Description of Artificial Sequence: Synthetic polypeptide
QVQLVQSGAEVKKPGASVKVSCKASGYTFTSYDINWVRQATGQGLEWMGWMNPNSGNTGYAQKFQGRVTMTRNTSISTAYMELSSLRSEDTAVYYCARDPYYYYYGMDVWGQGTTVTVSSASTKGPQVQLQESGPGLVKPSETLSLTCTVSGFSLIGYDLNWIRQPPGKGLEWIGIIWGDGTTDYNSAVKSRVTISKDTSKNQFSLKLSSVTAADTAVYYCARGGYWYATSYYFDYWGQGTLVTVSS

SEQ ID NO: 231 - protein, 226 aa, Artificial Sequence
  Description of Artificial Sequence: Synthetic polypeptide
QSVLTQPPSVSAAPGQKVTISCSGSSSNIENNHVSWYQQLPGTAPKLLIYDNNKRPSGIPDRFSGSKSGTSATLGITGLQTGDEADYYCETWDTSLSAGRVFGGGTKLTVLGQPKAAPDIQMTQSPSSLSASVGDRVTITCRASQSISNNLNWYQQKPGKAPKLLIYYTSRFHSGVPSRFSGSGSGTDFTFTISSLQPEDIATYYCQQEHTLPYTFGQGTKLEIKR

SEQ ID NO: 232 - protein, 251 aa, Artificial Sequence
  Description of Artificial Sequence: Synthetic polypeptide
QVQLQESGPGLVKPSETLSLTCTVSGFSLIGYDLNWIRQPPGKGLEWIGIIWGDGTTDYNSAVKSRVTISKDTSKNQFSLKLSSVTAADTAVYYCARGGYWYATSYYFDYWGQGTLVTVSSASTKGPEVQLVQSGGGLVKPGGSLRLSCAASGFTFSSYAMHWVRQAPGKGLEWVAVISYDGSNKYYADSVKGRFTISRDNSKNTLYLQMNSLRAEDTAVYYCARFSGWPNNYYYYGMDVWGQGTTVTVSS

SEQ ID NO: 233 - protein, 227 aa, Artificial Sequence
  Description of Artificial Sequence: Synthetic polypeptide
DIQMTQSPSSLSASVGDRVTITCRASQSISNNLNWYQQKPGKAPKLLIYYTSRFHSGVPSRFSGSGSGTDFTFTISSLQPEDIATYYCQQEHTLPYTFGQGTKLEIKRTVAAPDVVMTQSPLSLPVTPGEPASISCRSSQSLLHSNGFNYVDWYLQKPGQSPHLLIYFGSYRASGVPDRFSGSGSGTDFTLKISRVEAEDVGVYYCMQALQTPPWTFGQGTKVEIRR

SEQ ID NO: 234 - protein, 251 aa, Artificial Sequence
  Description of Artificial Sequence: Synthetic polypeptide
EVQLVQSGGGLVKPGGSLRLSCAASGFTFSSYAMHWVRQAPGKGLEWVAVISYDGSNKYYADSVKGRFTISRDNSKNTLYLQMNSLRAEDTAVYYCARFSGWPNNYYYYGMDVWGQGTTVTVSSASTKGPQVQLQESGPGLVKPSETLSLTCTVSGFSLIGYDLNWIRQPPGKGLEWIGIIWGDGTTDYNSAVKSRVTISKDTSKNQFSLKLSSVTAADTAVYYCARGGYWYATSYYFDYWGQGTLVTVSS

SEQ ID NO: 235 - protein, 227 aa, Artificial Sequence
  Description of Artificial Sequence: Synthetic polypeptide
DVVMTQSPLSLPVTPGEPASISCRSSQSLLHSNGFNYVDWYLQKPGQSPHLLIYFGSYRASGVPDRFSGSGSGTDFTLKISRVEAEDVGVYYCMQALQTPPWTFGQGTKVEIRRTVAAPDIQMTQSPSSLSASVGDRVTITCRASQSISNNLNWYQQKPGKAPKLLIYYTSRFHSGVPSRFSGSGSGTDFTFTISSLQPEDIATYYCQQEHTLPYTFGQGTKLEIKR

SEQ ID NO: 236 - protein, 244 aa, Artificial Sequence
  Description of Artificial Sequence: Synthetic polypeptide
QVQLQESGPGLVKPSETLSLTCTVSGFSLIGYDLNWIRQPPGKGLEWIGIIWGDGTTDYNSAVKSRVTISKDTSKNQFSLKLSSVTAADTAVYYCARGGYWYATSYYFDYWGQGTLVTVSSASTKGPQVQLQQWGAGLLKPSETLSLTCAVYGGSFSGYYWSWIRQPPGKGLEWIGEINHSGSTNYNPSLKSRVTISVETSKNQFSLKLSSVTAADTAVYYCARDKWTWYFDLWGRGTLVTVSS

SEQ ID NO: 237 - protein, 227 aa, Artificial Sequence
  Description of Artificial Sequence: Synthetic polypeptide
DIQMTQSPSSLSASVGDRVTITCRASQSISNNLNWYQQKPGKAPKLLIYYTSRFHSGVPSRFSGSGSGTDFTFTISSLQPEDIATYYCQQEHTLPYTFGQGTKLEIKRTVAAPDIEMTQSPDSLAVSLGERATINCRSSQSVLYSSSNRNYLAWYQQNPGQPPKLLIYWASTRESGVPDRFSGSGSGTDFTLTISSLQAEDVAVYYCQQYYSTPRTFGQGTKVEIKR

SEQ ID NO: 238 - protein, 244 aa, Artificial Sequence
  Description of Artificial Sequence: Synthetic polypeptide
QVQLQQWGAGLLKPSETLSLTCAVYGGSFSGYYWSWIRQPPGKGLEWIGEINHSGSTNYNPSLKSRVTISVETSKNQFSLKLSSVTAADTAVYYCARDKWTWYFDLWGRGTLVTVSSASTKGPQVQLQESGPGLVKPSETLSLTCTVSGFSLIGYDLNWIRQPPGKGLEWIGIIWGDGTTDYNSAVKSRVTISKDTSKNQFSLKLSSVTAADTAVYYCARGGYWYATSYYFDYWGQGTLVTVSS

SEQ ID NO: 239 - protein, 227 aa, Artificial Sequence
  Description of Artificial Sequence: Synthetic polypeptide
DIEMTQSPDSLAVSLGERATINCRSSQSVLYSSSNRNYLAWYQQNPGQPPKLLIYWASTRESGVPDRFSGSGSGTDFTLTISSLQAEDVAVYYCQQYYSTPRTFGQGTKVEIKRTVAAPDIQMTQSPSSLSASVGDRVTITCRASQSISNNLNWYQQKPGKAPKLLIYYTSRFHSGVPSRFSGSGSGTDFTFTISSLQPEDIATYYCQQEHTLPYTFGQGTKLEIKR

SEQ ID NO: 240 - protein, 246 aa, Artificial Sequence
  Description of Artificial Sequence: Synthetic polypeptide
QVQLQESGPGLVKPSETLSLTCTVSGFSLIGYDLNWIRQPPGKGLEWIGIIWGDGTTDYNSAVKSRVTISKDTSKNQFSLKLSSVTAADTAVYYCARGGYWYATSYYFDYWGQGTLVTVSSASTKGPEVQLVESGGGLVQPGGSLRLSCAASGFTFSIYSMNWVRQAPGKGLEWVSYISSSSSTIYYADSVKGRFTISRDNAKNSLYLQMNSLRDEDTAVYYCARDRGDFDAFDIWGQGTMVTVSS

SEQ ID NO: 241 - protein, 221 aa, Artificial Sequence
  Description of Artificial Sequence: Synthetic polypeptide
DIQMTQSPSSLSASVGDRVTITCRASQSISNNLNWYQQKPGKAPKLLIYYTSRFHSGVPSRFSGSGSGTDFTFTISSLQPEDIATYYCQQEHTLPYTFGQGTKLEIKRTVAAPDIQMTQSPSSLSASVGDRVTITCQASQDITNYLNWYQQKPGKAPKLLIYDASNLETGVPSRFSGSGSGTDFTFTISSLQPEDIATYNCQQCENFPITFGQGTRLEIKR

SEQ ID NO: 242 - protein, 246 aa, Artificial Sequence
  Description of Artificial Sequence: Synthetic polypeptide
EVQLVESGGGLVQPGGSLRLSCAASGFTFSIYSMNWVRQAPGKGLEWVSYISSSSSTIYYADSVKGRFTISRDNAKNSLYLQMNSLRDEDTAVYYCARDRGDFDAFDIWGQGTMVTVSSASTKGPQVQLQESGPGLVKPSETLSLTCTVSGFSLIGYDLNWIRQPPGKGLEWIGIIWGDGTTDYNSAVKSRVTISKDTSKNQFSLKLSSVTAADTAVYYCARGGYWYATSYYFDYWGQGTLVTVSS

SEQ ID NO: 243 - protein, 221 aa, Artificial Sequence
  Description of Artificial Sequence: Synthetic polypeptide
DIQMTQSPSSLSASVGDRVTITCQASQDITNYLNWYQQKPGKAPKLLIYDASNLETGVPSRFSGSGSGTDFTFTISSLQPEDIATYNCQQCENFPITFGQGTRLEIKRTVAAPDIQMTQSPSSLSASVGDRVTITCRASQSISNNLNWYQQKPGKAPKLLIYYTSRFHSGVPSRFSGSGSGTDFTFTISSLQPEDIATYYCQQEHTLPYTFGQGTKLEIKR

SEQ ID NO: 244 - protein, 246 aa, Artificial Sequence
  Description of Artificial Sequence: Synthetic polypeptide
QVQLQESGPGLVKPSETLSLTCTVSGFSLIGYDLNWIRQPPGKGLEWIGIIWGDGTTDYNSAVKSRVTISKDTSKNQFSLKLSSVTAADTAVYYCARGGYWYATSYYFDYWGQGTLVTVSSASTKGPQVQLQQSGAELARPGASVKMSCKASGYTFTRYTMHWVKQRPGQGLEWIGYINPSRGYTNYNQKFKDKATLTTDKSSSTAYMQLSSLTSEDSAVYYCARYYDDHYCLDYWGQGTTLTVSS

SEQ ID NO: 245 - protein, 220 aa, Artificial Sequence
  Description of Artificial Sequence: Synthetic polypeptide
DIQMTQSPSSLSASVGDRVTITCRASQSISNNLNWYQQKPGKAPKLLIYYTSRFHSGVPSRFSGSGSGTDFTFTISSLQPEDIATYYCQQEHTLPYTFGQGTKLEIKRTVAAPQIVLTQSPAIMSASPGEKVTMTCRASSSVSYMNWYQQKSGTSPKRWIYDTSKVASGVPYRFSGSGSGTSYSLTISSMEAEDAATYYCQQWSSNPLTFGSGTKLEINR

SEQ ID NO: 246 - protein, 246 aa, Artificial Sequence
  Description of Artificial Sequence: Synthetic polypeptide
QVQLQQSGAELARPGASVKMSCKASGYTFTRYTMHWVKQRPGQGLEWIGYINPSRGYTNYNQKFKDKATLTTDKSSSTAYMQLSSLTSEDSAVYYCARYYDDHYCLDYWGQGTTLTVSSASTKGPQVQLQESGPGLVKPSETLSLTCTVSGFSLIGYDLNWIRQPPGKGLEWIGIIWGDGTTDYNSAVKSRVTISKDTSKNQFSLKLSSVTAADTAVYYCARGGYWYATSYYFDYWGQGTLVTVSS

SEQ ID NO: 247 - protein, 220 aa, Artificial Sequence
  Description of Artificial Sequence: Synthetic polypeptide
QIVLTQSPAIMSASPGEKVTMTCRASSSVSYMNWYQQKSGTSPKRWIYDTSKVASGVPYRFSGSGSGTSYSLTISSMEAEDAATYYCQQWSSNPLTFGSGTKLEINRTVAAPDIQMTQSPSSLSASVGDRVTITCRASQSISNNLNWYQQKPGKAPKLLIYYTSRFHSGVPSRFSGSGSGTDFTFTISSLQPEDIATYYCQQEHTLPYTFGQGTKLEIKR

SEQ ID NO: 248 - protein, 252 aa, Artificial Sequence
  Description of Artificial Sequence: Synthetic polypeptide
QVQLQESGPGLVKPSETLSLTCTVSGFSLIGYDLNWIRQPPGKGLEWIGIIWGDGTTDYNSAVKSRVTISKDTSKNQFSLKLSSVTAADTAVYYCARGGYWYATSYYFDYWGQGTLVTVSSASTKGPEVQLLESGGGLVQPGGSLRLSCTASGFTFSSYAMNWVRQAPGKGLEWVSAISGSGGTTFYADSVKGRFTISRDNSRTTLYLQMNSLRAEDTAVYYCAKDLGWSDSYYYYYGMDVWGQGTTVTVSS

SEQ ID NO: 249 - protein, 221 aa, Artificial Sequence
  Description of Artificial Sequence: Synthetic polypeptide
DIQMTQSPSSLSASVGDRVTITCRASQSISNNLNWYQQKPGKAPKLLIYYTSRFHSGVPSRFSGSGSGTDFTFTISSLQPEDIATYYCQQEHTLPYTFGQGTKLEIKRTVAAPDIQMTQFPSSLSASVGDRVTITCRASQGIRNDLGWYQQKPGKAPKRLIYAASRLHRGVPSRFSGSGSGTEFTLTISSLQPEDFATYYCLQHNSYPCSFGQGTKLEIKR

SEQ ID NO: 250 - protein, 252 aa, Artificial Sequence
  Description of Artificial Sequence: Synthetic polypeptide
EVQLLESGGGLVQPGGSLRLSCTASGFTFSSYAMNWVRQAPGKGLEWVSAISGSGGTTFYADSVKGRFTISRDNSRTTLYLQMNSLRAEDTAVYYCAKDLGWSDSYYYYYGMDVWGQGTTVTVSSASTKGPQVQLQESGPGLVKPSETLSLTCTVSGFSLIGYDLNWIRQPPGKGLEWIGIIWGDGTTDYNSAVKSRVTISKDTSKNQFSLKLSSVTAADTAVYYCARGGYWYATSYYFDYWGQGTLVTVSS

SEQ ID NO: 251 - protein, 221 aa, Artificial Sequence
  Description of Artificial Sequence: Synthetic polypeptide
DIQMTQFPSSLSASVGDRVTITCRASQGIRNDLGWYQQKPGKAPKRLIYAASRLHRGVPSRFSGSGSGTEFTLTISSLQPEDFATYYCLQHNSYPCSFGQGTKLEIKRTVAAPDIQMTQSPSSLSASVGDRVTITCRASQSISNNLNWYQQKPGKAPKLLIYYTSRFHSGVPSRFSGSGSGTDFTFTISSLQPEDIATYYCQQEHTLPYTFGQGTKLEIKR

SEQ ID NO: 252 - protein, 249 aa, Artificial Sequence
  Description of Artificial Sequence: Synthetic polypeptide
QVQLQESGPGLVKPSETLSLTCTVSGFSLIGYDLNWIRQPPGKGLEWIGIIWGDGTTDYNSAVKSRVTISKDTSKNQFSLKLSSVTAADTAVYYCARGGYWYATSYYFDYWGQGTLVTVSSASTKGPQVQLVESGGGLVKPGGSLRLSCAASGFTFSDYYMSWIRQAPGKGLEWVSYISSSGSTIYYADSVKGRFTISRDNAKNSLYLQMNSLRAEDTAVYYCARDEYNSGWYVLFDYWGQGTLVTVSS

SEQ ID NO: 253 - protein, 221 aa, Artificial Sequence
  Description of Artificial Sequence: Synthetic polypeptide
DIQMTQSPSSLSASVGDRVTITCRASQSISNNLNWYQQKPGKAPKLLIYYTSRFHSGVPSRFSGSGSGTDFTFTISSLQPEDIATYYCQQEHTLPYTFGQGTKLEIKRTVAAPDIQMTQSPSSVSASVGDRVTITCRASQGISSWLAWYQQKPGKAPNLLIYEASSLQSGVPSRFGGSGSGTDFTLTISSLQPEDFATYYCQQANGFPWTFGQGTKVEIKR

SEQ ID NO: 254 - protein, 249 aa, Artificial Sequence
  Description of Artificial Sequence: Synthetic polypeptide
QVQLVESGGGLVKPGGSLRLSCAASGFTFSDYYMSWIRQAPGKGLEWVSYISSSGSTIYYADSVKGRFTISRDNAKNSLYLQMNSLRAEDTAVYYCARDEYNSGWYVLFDYWGQGTLVTVSSASTKGPQVQLQESGPGLVKPSETLSLTCTVSGFSLIGYDLNWIRQPPGKGLEWIGIIWGDGTTDYNSAVKSRVTISKDTSKNQFSLKLSSVTAADTAVYYCARGGYWYATSYYFDYWGQGTLVTVSS

SEQ ID NO: 255 - protein, 221 aa, Artificial Sequence
  Description of Artificial Sequence: Synthetic polypeptide
DIQMTQSPSSVSASVGDRVTITCRASQGISSWLAWYQQKPGKAPNLLIYEASSLQSGVPSRFGGSGSGTDFTLTISSLQPEDFATYYCQQANGFPWTFGQGTKVEIKRTVAAPDIQMTQSPSSLSASVGDRVTITCRASQSISNNLNWYQQKPGKAPKLLIYYTSRFHSGVPSRFSGSGSGTDFTFTISSLQPEDIATYYCQQEHTLPYTFGQGTKLEIKR

SEQ ID NO: 256 - protein, 250 aa, Artificial Sequence
  Description of Artificial Sequence: Synthetic polypeptide
QVQLQESGPGLVKPSETLSLTCTVSGFSLIGYDLNWIRQPPGKGLEWIGIIWGDGTTDYNSAVKSRVTISKDTSKNQFSLKLSSVTAADTAVYYCARGGYWYATSYYFDYWGQGTLVTVSSASTKGPEVQLVESGGGLVQPGGSLRLSCAASGYTFTNYGMNWVRQAPGKGLEWVGWINTYTGEPTYAADFKRRFTFSLDTSKSTAYLQMNSLRAEDTAVYYCAKYPHYYGSSHWYFDVWGQGTLVTVSS

SEQ ID NO: 257 - protein, 221 aa, Artificial Sequence
  Description of Artificial Sequence: Synthetic polypeptide
DIQMTQSPSSLSASVGDRVTITCRASQSISNNLNWYQQKPGKAPKLLIYYTSRFHSGVPSRFSGSGSGTDFTFTISSLQPEDIATYYCQQEHTLPYTFGQGTKLEIKRTVAAPDIQMTQSPSSLSASVGDRVTITCSASQDISNYLNWYQQKPGKAPKVLIYFTSSLHSGVPSRFSGSGSGTDFTLTISSLQPEDFATYYCQQYSTVPWTFGQGTKVEIKR

SEQ ID NO: 258 - protein, 250 aa, Artificial Sequence
  Description of Artificial Sequence: Synthetic polypeptide
EVQLVESGGGLVQPGGSLRLSCAASGYTFTNYGMNWVRQAPGKGLEWVGWINTYTGEPTYAADFKRRFTFSLDTSKSTAYLQMNSLRAEDTAVYYCAKYPHYYGSSHWYFDVWGQGTLVTVSSASTKGPQVQLQESGPGLVKPSETLSLTCTVSGFSLIGYDLNWIRQPPGKGLEWIGIIWGDGTTDYNSAVKSRVTISKDTSKNQFSLKLSSVTAADTAVYYCARGGYWYATSYYFDYWGQGTLVTVSS

SEQ ID NO: 259 - protein, 221 aa, Artificial Sequence
  Description of Artificial Sequence: Synthetic polypeptide
DIQMTQSPSSLSASVGDRVTITCSASQDISNYLNWYQQKPGKAPKVLIYFTSSLHSGVPSRFSGSGSGTDFTLTISSLQPEDFATYYCQQYSTVPWTFGQGTKVEIKRTVAAPDIQMTQSPSSLSASVGDRVTITCRASQSISNNLNWYQQKPGKAPKLLIYYTSRFHSGVPSRFSGSGSGTDFTFTISSLQPEDIATYYCQQEHTLPYTFGQGTKLEIKR

SEQ ID NO: 260 - protein, 245 aa, Artificial Sequence
  Description of Artificial Sequence: Synthetic polypeptide
QVQLQESGPGLVKPSETLSLTCTVSGFSLIGYDLNWIRQPPGKGLEWIGIIWGDGTTDYNSAVKSRVTISKDTSKNQFSLKLSSVTAADTAVYYCARGGYWYATSYYFDYWGQGTLVTVSSASTKGPEVQLVESGGGLVQPGGSLRLSCAASGFTFTDNWISWVRQAPGKGLEWVGYISPNSGFTYYADSVKGRFTISADTSKNTAYLQMNSLRAEDTAVYYCARDNFGGYFDYWGQGTLVTVSS

SEQ ID NO: 261 - protein, 222 aa, Artificial Sequence
  Description of Artificial Sequence: Synthetic polypeptide
DIQMTQSPSSLSASVGDRVTITCRASQSISNNLNWYQQKPGKAPKLLIYYTSRFHSGVPSRFSGSGSGTDFTFTISSLQPEDIATYYCQQEHTLPYTFGQGTKLEIKRTVAAPDIQMTQSPSSLSASVGDRVTITCRASQDVSTAVAWYQQKPGKAPKLLIYSASFLYSGVPSRFSGSGSGTDFTLTISSLQPEDFATTYYCQQSYTGTVTFGQGTKVEIKR

SEQ ID NO: 262 - protein, 245 aa, Artificial Sequence
  Description of Artificial Sequence: Synthetic polypeptide
EVQLVESGGGLVQPGGSLRLSCAASGFTFTDNWISWVRQAPGKGLEWVGYISPNSGFTYYADSVKGRFTISADTSKNTAYLQMNSLRAEDTAVYYCARDNFGGYFDYWGQGTLVTVSSASTKGPQVQLQESGPGLVKPSETLSLTCTVSGFSLIGYDLNWIRQPPGKGLEWIGIIWGDGTTDYNSAVKSRVTISKDTSKNQFSLKLSSVTAADTAVYYCARGGYWYATSYYFDYWGQGTLVTVSS

SEQ ID NO: 263 - protein, 222 aa, Artificial Sequence
  Description of Artificial Sequence: Synthetic polypeptide
DIQMTQSPSSLSASVGDRVTITCRASQDVSTAVAWYQQKPGKAPKLLIYSASFLYSGVPSRFSGSGSGTDFTLTISSLQPEDFATTYYCQQSYTGTVTFGQGTKVEIKRTVAAPDIQMTQSPSSLSASVGDRVTITCRASQSISNNLNWYQQKPGKAPKLLIYYTSRFHSGVPSRFSGSGSGTDFTFTISSLQPEDIATYYCQQEHTLPYTFGQGTKLEIKR

SEQ ID NO: 264 - protein, 243 aa, Artificial Sequence
  Description of Artificial Sequence: Synthetic polypeptide
QVQLQESGPGLVKPSETLSLTCTVSGFSLIGYDLNWIRQPPGKGLEWIGIIWGDGTTDYNSAVKSRVTISKDTSKNQFSLKLSSVTAADTAVYYCARGGYWYATSYYFDYWGQGTLVTVSSASTKGPQVQLQQSGAELVKPGASVKISCKASGYTFTDYYINWVKLAPGQGLEWIGWIYPGSGNTKYNEKFKGKATLTIDTSSSTAYMQLSSLTSEDTAVYFCVRDSPFFDYWGQGTLLTVSS

SEQ ID NO: 265 - protein, 226 aa, Artificial Sequence
  Description of Artificial Sequence: Synthetic polypeptide
DIQMTQSPSSLSASVGDRVTITCRASQSISNNLNWYQQKPGKAPKLLIYYTSRFHSGVPSRFSGSGSGTDFTFTISSLQPEDIATYYCQQEHTLPYTFGQGTKLEIKRTVAAPDIVLTQSPDSLAVSLGERVTMNCKSSQSLLNSGMRKSFLAWYQQKPGQSPKLLIYWASTRESGVPDRFTGSGSGTDFTLTISSVQAEDVAVYYCKQSYHLFTFGSGTKLEIKR

SEQ ID NO: 266 - protein, 243 aa, Artificial Sequence
  Description of Artificial Sequence: Synthetic polypeptide
QVQLQQSGAELVKPGASVKISCKASGYTFTDYYINWVKLAPGQGLEWIGWIYPGSGNTKYNEKFKGKATLTIDTSSSTAYMQLSSLTSEDTAVYFCVRDSPFFDYWGQGTLLTVSSASTKGPQVQLQESGPGLVKPSETLSLTCTVSGFSLIGYDLNWIRQPPGKGLEWIGIIWGDGTTDYNSAVKSRVTISKDTSKNQFSLKLSSVTAADTAVYYCARGGYWYATSYYFDYWGQGTLVTVSS

SEQ ID NO: 267 - protein, 226 aa, Artificial Sequence
  Description of Artificial Sequence: Synthetic polypeptide
DIVLTQSPDSLAVSLGERVTMNCKSSQSLLNSGMRKSFLAWYQQKPGQSPKLLIYWASTRESGVPDRFTGSGSGTDFTLTISSVQAEDVAVYYCKQSYHLFTFGSGTKLEIKRTVAAPDIQMTQSPSSLSASVGDRVTITCRASQSISNNLNWYQQKPGKAPKLLIYYTSRFHSGVPSRFSGSGSGTDFTFTISSLQPEDIATYYCQQEHTLPYTFGQGTKLEIKR

SEQ ID NO: 268 - protein, 254 aa, Artificial Sequence
  Description of Artificial Sequence: Synthetic polypeptide
QVQLQESGPGLVKPSETLSLTCTVSGFSLIGYDLNWIRQPPGKGLEWIGIIWGDGTTDYNSAVKSRVTISKDTSKNQFSLKLSSVTAADTAVYYCARGGYWYATSYYFDYWGQGTLVTVSSASTKGPQVQLQESGPGLVKPSEILSLTCTVSGGSISSHYWSWVRQPPGKGLEWIGYIYYSGSTNYNPSLKSRVTISVDTSKNQFSLNLSSVTAADTAVYYCARIPNYYDRSGYYPGYWYFDLWGRGTLVTVSS

SEQ ID NO: 269 - protein, 229 aa, Artificial Sequence
  Description of Artificial Sequence: Synthetic polypeptide
DIQMTQSPSSLSASVGDRVTITCRASQSISNNLNWYQQKPGKAPKLLIYYTSRFHSGVPSRFSGSGSGTDFTFTISSLQPEDIATYYCQQEHTLPYTFGQGTKLEIKRTVAAPQAVLTQPSSLSAPPGASASLTCTLRSGFNVDSYRISWYQQKPGSPPQYLLRYKSDSDKQQGSGVPSRFSGSKDASANAGILLISGLQSEDEADYYCMIWHSSAWVFGGGTKLTVLR

SEQ ID NO: 270 - protein, 254 aa, Artificial Sequence
  Description of Artificial Sequence: Synthetic polypeptide
QVQLQESGPGLVKPSEILSLTCTVSGGSISSHYWSWVRQPPGKGLEWIGYIYYSGSTNYNPSLKSRVTISVDTSKNQFSLNLSSVTAADTAVYYCARIPNYYDRSGYYPGYWYFDLWGRGTLVTVSSASTKGPQVQLQESGPGLVKPSETLSLTCTVSGFSLIGYDLNWIRQPPGKGLEWIGIIWGDGTTDYNSAVKSRVTISKDTSKNQFSLKLSSVTAADTAVYYCARGGYWYATSYYFDYWGQGTLVTVSS

SEQ ID NO: 271 - protein, 230 aa, Artificial Sequence
  Description of Artificial Sequence: Synthetic polypeptide
QAVLTQPSSLSAPPGASASLTCTLRSGFNVDSYRISWYQQKPGSPPQYLLRYKSDSDKQQGSGVPSRFSGSKDASANAGILLISGLQSEDEADYYCMIWHSSAWVFGGGTKLTVLRQPKAAPDIQMTQSPSSLSASVGDRVTITCRASQSISNNLNWYQQKPGKAPKLLIYYTSRFHSGVPSRFSGSGSGTDFTFTISSLQPEDIATYYCQQEHTLPYTFGQGTKLEIKR

SEQ ID NO: 272 - protein, 248 aa, Artificial Sequence
  Description of Artificial Sequence: Synthetic polypeptide
QVQLQESGPGLVKPSETLSLTCTVSGFSLIGYDLNWIRQPPGKGLEWIGIIWGDGTTDYNSAVKSRVTISKDTSKNQFSLKLSSVTAADTAVYYCARGGYWYATSYYFDYWGQGTLVTVSSASTKGPQVQLQQPGAELVKPGASVKMSCKASGYTFTSYNMHWVKQTPGRGLEWIGAIYPGNGDTSYNQKFKGKATLTADKSSSTAYMQLSSLTSEDSAVYYCARSTYYGGDWYFNVWGAGTTVTVSA

SEQ ID NO: 273 - protein, 220 aa, Artificial Sequence
  Description of Artificial Sequence: Synthetic polypeptide
DIQMTQSPSSLSASVGDRVTITCRASQSISNNLNWYQQKPGKAPKLLIYYTSRFHSGVPSRFSGSGSGTDFTFTISSLQPEDIATYYCQQEHTLPYTFGQGTKLEIKRTVAAPQIVLSQSPAILSPSPGEKVTMTCRASSSVSYIHWFQQKPGSSPKPWIYATSNLASGVPVRFSGSGSGTSYSLTISRVEAEDAATYYCQQWTSNPPTFGGGTKLEIKR

SEQ ID NO: 274 - protein, 248 aa, Artificial Sequence
  Description of Artificial Sequence: Synthetic polypeptide
QVQLQQPGAELVKPGASVKMSCKASGYTFTSYNMHWVKQTPGRGLEWIGAIYPGNGDTSYNQKFKGKATLTADKSSSTAYMQLSSLTSEDSAVYYCARSTYYGGDWYFNVWGAGTTVTVSAASTKGPQVQLQESGPGLVKPSETLSLTCTVSGFSLIGYDLNWIRQPPGKGLEWIGIIWGDGTTDYNSAVKSRVTISKDTSKNQFSLKLSSVTAADTAVYYCARGGYWYATSYYFDYWGQGTLVTVSS

SEQ ID NO: 275 - protein, 220 aa, Artificial Sequence
  Description of Artificial Sequence: Synthetic polypeptide
QIVLSQSPAILSPSPGEKVTMTCRASSSVSYIHWFQQKPGSSPKPWIYATSNLASGVPVRFSGSGSGTSYSLTISRVEAEDAATYYCQQWTSNPPTFGGGTKLEIKRTVAAPDIQMTQSPSSLSASVGDRVTITCRASQSISNNLNWYQQKPGKAPKLLIYYTSRFHSGVPSRFSGSGSGTDFTFTISSLQPEDIATYYCQQEHTLPYTFGQGTKLEIKR

SEQ ID NO: 276 - protein, 246 aa, Artificial Sequence
  Description of Artificial Sequence: Synthetic polypeptide
QVQLQESGPGLVKPSETLSLTCTVSGFSLIGYDLNWIRQPPGKGLEWIGIIWGDGTTDYNSAVKSRVTISKDTSKNQFSLKLSSVTAADTAVYYCARGGYWYATSYYFDYWGQGTLVTVSSASTKGPQVQLQESGPGLVKPSETLSLTCTVSGGSVSSGDYYWTWIRQSPGKGLEWIGHIYYSGNTNYNPSLKSRLTISIDTSKTQFSLKLSSVTAADTAIYYCVRDRVTGAFDIWGQGTMVTVSS

SEQ ID NO: 277 - protein, 221 aa, Artificial Sequence
  Description of Artificial Sequence: Synthetic polypeptide
DIQMTQSPSSLSASVGDRVTITCRASQSISNNLNWYQQKPGKAPKLLIYYTSRFHSGVPSRFSGSGSGTDFTFTISSLQPEDIATYYCQQEHTLPYTFGQGTKLEIKRTVAAPDIQMTQSPSSLSASVGDRVTITCQASQDISNYLNWYQQKPGKAPKLLIYDASNLETGVPSRFSGSGSGTDFTFTISSLQPEDIATYFCQHFDHLPLAFGGGTKVEIKR

SEQ ID NO: 278 - protein, 246 aa, Artificial Sequence
  Description of Artificial Sequence: Synthetic polypeptide
QVQLQESGPGLVKPSETLSLTCTVSGGSVSSGDYYWTWIRQSPGKGLEWIGHIYYSGNTNYNPSLKSRLTISIDTSKTQFSLKLSSVTAADTAIYYCVRDRVTGAFDIWGQGTMVTVSSASTKGPQVQLQESGPGLVKPSETLSLTCTVSGFSLIGYDLNWIRQPPGKGLEWIGIIWGDGTTDYNSAVKSRVTISKDTSKNQFSLKLSSVTAADTAVYYCARGGYWYATSYYFDYWGQGTLVTVSS

SEQ ID NO: 279 - protein, 221 aa, Artificial Sequence
  Description of Artificial Sequence: Synthetic polypeptide
DIQMTQSPSSLSASVGDRVTITCQASQDISNYLNWYQQKPGKAPKLLIYDASNLETGVPSRFSGSGSGTDFTFTISSLQPEDIATYFCQHFDHLPLAFGGGTKVEIKRTVAAPDIQMTQSPSSLSASVGDRVTITCRASQSISNNLNWYQQKPGKAPKLLIYYTSRFHSGVPSRFSGSGSGTDFTFTISSLQPEDIATYYCQQEHTLPYTFGQGTKLEIKR

SEQ ID NO: 280 - protein, 247 aa, Artificial Sequence
  Description of Artificial Sequence: Synthetic polypeptide
QVQLQESGPGLVKPSETLSLTCTVSGFSLIGYDLNWIRQPPGKGLEWIGIIWGDGTTDYNSAVKSRVTISKDTSKNQFSLKLSSVTAADTAVYYCARGGYWYATSYYFDYWGQGTLVTVSSASTKGPEVQLVESGGGLVQPGGSLRLSCAASGFNIKDTYIHWVRQAPGKGLEWVARIYPTNGYTRYADSVKGRFTISADTSKNTAYLQMNSLRAEDTAVYYCSRWGGDGFYAMDYWGQGTLVTVSS

SEQ ID NO: 281 - protein, 221 aa, Artificial Sequence
  Description of Artificial Sequence: Synthetic polypeptide
DIQMTQSPSSLSASVGDRVTITCRASQSISNNLNWYQQKPGKAPKLLIYYTSRFHSGVPSRFSGSGSGTDFTFTISSLQPEDIATYYCQQEHTLPYTFGQGTKLEIKRTVAAPDIQMTQSPSSLSASVGDRVTITCRASQDVNTAVAWYQQKPGKAPKLLIYSASFLYSGVPSRFSGSRSGTDFTLTISSLQPEDFATYYCQQHYTTPPTFGQGTKVEIKR

SEQ ID NO: 282 - protein, 247 aa, Artificial Sequence
  Description of Artificial Sequence: Synthetic polypeptide
EVQLVESGGGLVQPGGSLRLSCAASGFNIKDTYIHWVRQAPGKGLEWVARIYPTNGYTRYADSVKGRFTISADTSKNTAYLQMNSLRAEDTAVYYCSRWGGDGFYAMDYWGQGTLVTVSSASTKGPQVQLQESGPGLVKPSETLSLTCTVSGFSLIGYDLNWIRQPPGKGLEWIGIIWGDGTTDYNSAVKSRVTISKDTSKNQFSLKLSSVTAADTAVYYCARGGYWYATSYYFDYWGQGTLVTVSS

SEQ ID NO: 283 - protein, 221 aa, Artificial Sequence
  Description of Artificial Sequence: Synthetic polypeptide
DIQMTQSPSSLSASVGDRVTITCRASQDVNTAVAWYQQKPGKAPKLLIYSASFLYSGVPSRFSGSRSGTDFTLTISSLQPEDFATYYCQQHYTTPPTFGQGTKVEIKRTVAAPDIQMTQSPSSLSASVGDRVTITCRASQSISNNLNWYQQKPGKAPKLLIYYTSRFHSGVPSRFSGSGSGTDFTFTISSLQPEDIATYYCQQEHTLPYTFGQGTKLEIKR

SEQ ID NO: 284 - protein, 251 aa, Artificial Sequence
  Description of Artificial Sequence: Synthetic polypeptide
QVQLQESGPGLVKPSETLSLTCTVSGFSLIGYDLNWIRQPPGKGLEWIGIIWGDGTTDYNSAVKSRVTISKDTSKNQFSLKLSSVTAADTAVYYCARGGYWYATSYYFDYWGQGTLVTVSSASTKGPQVQLQQSGAELVRPGSSVKISCKASGYAFSSYWMNWVKQRPGQGLEWIGQIWPGDGDTNYNGKFKGKATLTADESSSTAYMQLSSLASEDSAVYFCARRETTTVGRYYYAMDYWGQGTSVTVSS

SEQ ID NO: 285 - protein, 225 aa, Artificial Sequence
  Description of Artificial Sequence: Synthetic polypeptide
DIQMTQSPSSLSASVGDRVTITCRASQSISNNLNWYQQKPGKAPKLLIYYTSRFHSGVPSRFSGSGSGTDFTFTISSLQPEDIATYYCQQEHTLPYTFGQGTKLEIKRTVAAPDILLTQTPASLAVSLGQRATISCKASQSVDYDGDSYLNWYQQIPGQPPKLLIYDASNLVSGIPPRFSGSGSGTDFTLNIHPVEKVDAATYHCQQSTEDPWTFGGGTKLEIKR

SEQ ID NO: 286 - protein, 251 aa, Artificial Sequence
  Description of Artificial Sequence: Synthetic polypeptide
QVQLQQSGAELVRPGSSVKISCKASGYAFSSYWMNWVKQRPGQGLEWIGQIWPGDGDTNYNGKFKGKATLTADESSSTAYMQLSSLASEDSAVYFCARRETTTVGRYYYAMDYWGQGTSVTVSSASTKGPQVQLQESGPGLVKPSETLSLTCTVSGFSLIGYDLNWIRQPPGKGLEWIGIIWGDGTTDYNSAVKSRVTISKDTSKNQFSLKLSSVTAADTAVYYCARGGYWYATSYYFDYWGQGTLVTVSS

SEQ ID NO: 287 - protein, 225 aa, Artificial Sequence
  Description of Artificial Sequence: Synthetic polypeptide
DILLTQTPASLAVSLGQRATISCKASQSVDYDGDSYLNWYQQIPGQPPKLLIYDASNLVSGIPPRFSGSGSGTDFTLNIHPVEKVDAATYHCQQSTEDPWTFGGGTKLEIKRTVAAPDIQMTQSPSSLSASVGDRVTITCRASQSISNNLNWYQQKPGKAPKLLIYYTSRFHSGVPSRFSGSGSGTDFTFTISSLQPEDIATYYCQQEHTLPYTFGQGTKLEIKR

SEQ ID NO: 288 - protein, 254 aa, Artificial Sequence
  Description of Artificial Sequence: Synthetic polypeptide
QVQLQESGPGLVKPSETLSLTCTVSGFSLIGYDLNWIRQPPGKGLEWIGIIWGDGTTDYNSAVKSRVTISKDTSKNQFSLKLSSVTAADTAVYYCARGGYWYATSYYFDYWGQGTLVTVSSASTKGPQVQLQESGPGLVKPSETLSLTCAVSGGSISGGYGWGWIRQPPGKGLEWIGSFYSSSGNTYYNPSLKSQVTISTDTSKNQFSLKLNSMTAADTAVYYCVRDRLFSVVGMVYNNWFDVWGPGVLVTVSS

SEQ ID NO: 289 - protein, 224 aa, Artificial Sequence
  Description of Artificial Sequence: Synthetic polypeptide
DIQMTQSPSSLSASVGDRVTITCRASQSISNNLNWYQQKPGKAPKLLIYYTSRFHSGVPSRFSGSGSGTDFTFTISSLQPEDIATYYCQQEHTLPYTFGQGTKLEIKRTVAAPESALTQPPSVSGAPGQKVTISCTGSTSNIGGYDLHWYQQLPGTAPKLLIYDINKRPSGISDRFSGSKSGTAASLAITGLQTEDEADYYCQSYDSSLNAQVFGGGTRLTVLG

SEQ ID NO: 290 - protein, 254 aa, Artificial Sequence
  Description of Artificial Sequence: Synthetic polypeptide
QVQLQESGPGLVKPSETLSLTCAVSGGSISGGYGWGWIRQPPGKGLEWIGSFYSSSGNTYYNPSLKSQVTISTDTSKNQFSLKLNSMTAADTAVYYCVRDRLFSVVGMVYNNWFDVWGPGVLVTVSSASTKGPQVQLQESGPGLVKPSETLSLTCTVSGFSLIGYDLNWIRQPPGKGLEWIGIIWGDGTTDYNSAVKSRVTISKDTSKNQFSLKLSSVTAADTAVYYCARGGYWYATSYYFDYWGQGTLVTVSS

SEQ ID NO: 291 - protein, 225 aa, Artificial Sequence
  Description of Artificial Sequence: Synthetic polypeptide
ESALTQPPSVSGAPGQKVTISCTGSTSNIGGYDLHWYQQLPGTAPKLLIYDINKRPSGISDRFSGSKSGTAASLAITGLQTEDEADYYCQSYDSSLNAQVFGGGTRLTVLGQPKAAPDIQMTQSPSSLSASVGDRVTITCRASQSISNNLNWYQQKPGKAPKLLIYYTSRFHSGVPSRFSGSGSGTDFTFTISSLQPEDIATYYCQQEHTLPYTFGQGTKLEIKR

SEQ ID NO: 292 - protein, 243 aa, Artificial Sequence
  Description of Artificial Sequence: Synthetic polypeptide
QVQLQESGPGLVKPSETLSLTCTVSGFSLIGYDLNWIRQPPGKGLEWIGIIWGDGTTDYNSAVKSRVTISKDTSKNQFSLKLSSVTAADTAVYYCARGGYWYATSYYFDYWGQGTLVTVSSASTKGPQVQLVQSGAEVKKPGSSVKVSCKASGYTFTSYWLHWVRQAPGQGLEWIGYINPRNDYTEYNQNFKDKATITADESTNTAYMELSSLRSEDTAFYFCARRDITTFYWGQGTTVTVSS

SEQ ID NO: 293 - protein, 226 aa, Artificial Sequence
  Description of Artificial Sequence: Synthetic polypeptide
DIQMTQSPSSLSASVGDRVTITCRASQSISNNLNWYQQKPGKAPKLLIYYTSRFHSGVPSRFSGSGSGTDFTFTISSLQPEDIATYYCQQEHTLPYTFGQGTKLEIKRTVAAPDIQLTQSPSSLSASVGDRVTMSCKSSQSVLYSANHKNYLAWYQQKPGKAPKLLIYWASTRESGVPSRFSGSGSGTDFTFTISSLQPEDIATYYCHQYLSSWTFGGGTKLEIKR

SEQ ID NO: 294 - protein, 243 aa, Artificial Sequence
  Description of Artificial Sequence: Synthetic polypeptide
QVQLVQSGAEVKKPGSSVKVSCKASGYTFTSYWLHWVRQAPGQGLEWIGYINPRNDYTEYNQNFKDKATITADESTNTAYMELSSLRSEDTAFYFCARRDITTFYWGQGTTVTVSSASTKGPQVQLQESGPGLVKPSETLSLTCTVSGFSLIGYDLNWIRQPPGKGLEWIGIIWGDGTTDYNSAVKSRVTISKDTSKNQFSLKLSSVTAADTAVYYCARGGYWYATSYYFDYWGQGTLVTVSS

SEQ ID NO: 295 - protein, 226 aa, Artificial Sequence
  Description of Artificial Sequence: Synthetic polypeptide
DIQLTQSPSSLSASVGDRVTMSCKSSQSVLYSANHKNYLAWYQQKPGKAPKLLIYWASTRESGVPSRFSGSGSGTDFTFTISSLQPEDIATYYCHQYLSSWTFGGGTKLEIKRTVAAPDIQMTQSPSSLSASVGDRVTITCRASQSISNNLNWYQQKPGKAPKLLIYYTSRFHSGVPSRFSGSGSGTDFTFTISSLQPEDIATYYCQQEHTLPYTFGQGTKLEIKR

SEQ ID NO: 296 - protein, 247 aa, Artificial Sequence
  Description of Artificial Sequence: Synthetic polypeptide
QVQLQESGPGLVKPSETLSLTCTVSGFSLIGYDLNWIRQPPGKGLEWIGIIWGDGTTDYNSAVKSRVTISKDTSKNQFSLKLSSVTAADTAVYYCARGGYWYATSYYFDYWGQGTLVTVSSASTKGPQVQLVESGGGVVQPGRSLRLSCAASGFTFSSYGMHWVRQAPGKGLEWVAVISYEESNRYHADSVKGRFTISRDNSKITLYLQMNSLRTEDTAVYYCARDGGIAAPGPDYWGQGTLVTVSS

SEQ ID NO: 297 - protein, 226 aa, Artificial Sequence
  Description of Artificial Sequence: Synthetic polypeptide
DIQMTQSPSSLSASVGDRVTITCRASQSISNNLNWYQQKPGKAPKLLIYYTSRFHSGVPSRFSGSGSGTDFTFTISSLQPEDIATYYCQQEHTLPYTFGQGTKLEIKRTVAAPDIVMTQSPLSLTVTPGEPASISCRSSQSLLYSNGYNYLDWYLQKPGQSPQVLISLGSNRASGVPDRFSGSGSGTDFTLKISRVEAEDVGVYYCMQARQTPFTFGPGTKVDIRR

SEQ ID NO: 298 - protein, 247 aa, Artificial Sequence
  Description of Artificial Sequence: Synthetic polypeptide
QVQLVESGGGVVQPGRSLRLSCAASGFTFSSYGMHWVRQAPGKGLEWVAVISYEESNRYHADSVKGRFTISRDNSKITLYLQMNSLRTEDTAVYYCARDGGIAAPGPDYWGQGTLVTVSSASTKGPQVQLQESGPGLVKPSETLSLTCTVSGFSLIGYDLNWIRQPPGKGLEWIGIIWGDGTTDYNSAVKSRVTISKDTSKNQFSLKLSSVTAADTAVYYCARGGYWYATSYYFDYWGQGTLVTVSS

SEQ ID NO: 299 - protein, 226 aa, Artificial Sequence
  Description of Artificial Sequence: Synthetic polypeptide
DIVMTQSPLSLTVTPGEPASISCRSSQSLLYSNGYNYLDWYLQKPGQSPQVLISLGSNRASGVPDRFSGSGSGTDFTLKISRVEAEDVGVYYCMQARQTPFTFGPGTKVDIRRTVAAPDIQMTQSPSSLSASVGDRVTITCRASQSISNNLNWYQQKPGKAPKLLIYYTSRFHSGVPSRFSGSGSGTDFTFTISSLQPEDIATYYCQQEHTLPYTFGQGTKLEIKR

SEQ ID NO: 300 - protein, 248 aa, Artificial Sequence
  Description of Artificial Sequence: Synthetic polypeptide
QVQLQESGPGLVKPSETLSLTCTVSGFSLIGYDLNWIRQPPGKGLEWIGIIWGDGTTDYNSAVKSRVTISKDTSKNQFSLKLSSVTAADTAVYYCARGGYWYATSYYFDYWGQGTLVTVSSASTKGPQVQLQQSGPELVRPGASVKWSCPASGYTFTSYWLHWVKKQRPGQGLEWIGMIDPSNSDTRFNPPNFKDKATLNVDRSSNTAYNLLSSLTSADSAVYYCATYGSYVSPLDYWGQGTSVYVSS

SEQ ID NO: 301 - protein, 227 aa, Artificial Sequence
  Description of Artificial Sequence: Synthetic polypeptide
DIQMTQSPSSLSASVGDRVTITCRASQSISNNLNWYQQKPGKAPKLLIYYTSRFHSGVPSRFSGSGSGTDFTFTISSLQPEDIATYYCQQEHTLPYTFGQGTKLEIKRTVAAPDIMMSQSPSSLTVSVGEKVTVSCKSSQSLLVTSSQKNYLAWYQQKPQQSPKLLIYWASTRESGVPDRFTGSGSGTDFTLTITSVKADDLAVYYCQQYYAYPWTFGDGTKLEIKR

SEQ ID NO: 302 - protein, 248 aa, Artificial Sequence
  Description of Artificial Sequence: Synthetic polypeptide
QVQLQQSGPELVRPGASVKWSCPASGYTFTSYWLHWVKKQRPGQGLEWIGMIDPSNSDTRFNPPNFKDKATLNVDRSSNTAYNLLSSLTSADSAVYYCATYGSYVSPLDYWGQGTSVYVSSASTKGPQVQLQESGPGLVKPSETLSLTCTVSGFSLIGYDLNWIRQPPGKGLEWIGIIWGDGTTDYNSAVKSRVTISKDTSKNQFSLKLSSVTAADTAVYYCARGGYWYATSYYFDYWGQGTLVTVSS

SEQ ID NO: 303 - protein, 227 aa, Artificial Sequence
  Description of Artificial Sequence: Synthetic polypeptide
DIMMSQSPSSLTVSVGEKVTVSCKSSQSLLVTSSQKNYLAWYQQKPQQSPKLLIYWASTRESGVPDRFTGSGSGTDFTLTITSVKADDLAVYYCQQYYAYPWTFGDGTKLEIKRTVAAPDIQMTQSPSSLSASVGDRVTITCRASQSISNNLNWYQQKPGKAPKLLIYYTSRFHSGVPSRFSGSGSGTDFTFTISSLQPEDIATYYCQQEHTLPYTFGQGTKLEIKR

SEQ ID NO: 304 - protein, 246 aa, Artificial Sequence
  Description of Artificial Sequence: Synthetic polypeptide
QVQLQESGPGLVKPSETLSLTCTVSGFSLIGYDLNWIRQPPGKGLEWIGIIWGDGTTDYNSAVKSRVTISKDTSKNQFSLKLSSVTAADTAVYYCARGGYWYATSYYFDYWGQGTLVTVSSASTKGPEVQLVESGGGLVQPGGSLRLSCAASGFSFSSEPISWVRQAPGKGLEWVSSITGKNGYTYYADSVKGRFTISADTSKNTAYLQMNSLRAEDTAVYYCARWGKKVYGMDVWGQGTLVTVSS

SEQ ID NO: 305 - protein, 221 aa, Artificial Sequence
  Description of Artificial Sequence: Synthetic polypeptide
DIQMTQSPSSLSASVGDRVTITCRASQSISNNLNWYQQKPGKAPKLLIYYTSRFHSGVPSRFSGSGSGTDFTFTISSLQPEDIATYYCQQEHTLPYTFGQGTKLEIKRTVAAPDIQMTQSPSSLSASVGDRVTITCRASQSISSYLAWYQQKPGKAPKLLIYGASSRASGVPSRFSGSGSGTDFTLTISSLQPEDFATYYCQQYMSVPITFGQGTKVEIKR

SEQ ID NO: 306 - protein, 246 aa, Artificial Sequence
  Description of Artificial Sequence: Synthetic polypeptide
EVQLVESGGGLVQPGGSLRLSCAASGFSFSSEPISWVRQAPGKGLEWVSSITGKNGYTYYADSVKGRFTISADTSKNTAYLQMNSLRAEDTAVYYCARWGKKVYGMDVWGQGTLVTVSSASTKGPQVQLQESGPGLVKPSETLSLTCTVSGFSLIGYDLNWIRQPPGKGLEWIGIIWGDGTTDYNSAVKSRVTISKDTSKNQFSLKLSSVTAADTAVYYCARGGYWYATSYYFDYWGQGTLVTVSS

SEQ ID NO: 307 - protein, 221 aa, Artificial Sequence
  Description of Artificial Sequence: Synthetic polypeptide
DIQMTQSPSSLSASVGDRVTITCRASQSISSYLAWYQQKPGKAPKLLIYGASSRASGVPSRFSGSGSGTDFTLTISSLQPEDFATYYCQQYMSVPITFGQGTKVEIKRTVAAPDIQMTQSPSSLSASVGDRVTITCRASQSISNNLNWYQQKPGKAPKLLIYYTSRFHSGVPSRFSGSGSGTDFTFTISSLQPEDIATYYCQQEHTLPYTFGQGTKLEIKR

SEQ ID NO: 308 - protein, 249 aa, Artificial Sequence
  Description of Artificial Sequence: Synthetic polypeptide
QVQLQESGPGLVKPSETLSLTCTVSGFSLIGYDLNWIRQPPGKGLEWIGIIWGDGTTDYNSAVKSRVTISKDTSKNQFSLKLSSVTAADTAVYYCARGGYWYATSYYFDYWGQGTLVTVSSASTKGPEVQLVESGGGLVQPGGSLRLSCAASGFTFSSYAMSWVRQAPGKGLEWVSQISPAGGYTNYADSVKGRFTISADTSKNTAYLQMNSLRAEDTAVYYCARELPYYRMSKVMDVQGQGTLVTVSS

SEQ ID NO: 309 - protein, 221 aa, Artificial Sequence
  Description of Artificial Sequence: Synthetic polypeptide
DIQMTQSPSSLSASVGDRVTITCRASQSISNNLNWYQQKPGKAPKLLIYYTSRFHSGVPSRFSGSGSGTDFTFTISSLQPEDIATYYCQQEHTLPYTFGQGTKLEIKRTVAAPDIQMTQSPSSLSASVGDRVTITCRASQYFSSYLAWYQQKPGKAPKLLIYGASSRASGVPSRFSGSGSGTDFTLTISSLQPEDFATYYCQQYLGSPPTFGQGTKVEIKR

SEQ ID NO: 310 - protein, 249 aa, Artificial Sequence
  Description of Artificial Sequence: Synthetic polypeptide
EVQLVESGGGLVQPGGSLRLSCAASGFTFSSYAMSWVRQAPGKGLEWVSQISPAGGYTNYADSVKGRFTISADTSKNTAYLQMNSLRAEDTAVYYCARELPYYRMSKVMDVQGQGTLVTVSSASTKGPQVQLQESGPGLVKPSETLSLTCTVSGFSLIGYDLNWIRQPPGKGLEWIGIIWGDGTTDYNSAVKSRVTISKDTSKNQFSLKLSSVTAADTAVYYCARGGYWYATSYYFDYWGQGTLVTVSS

SEQ ID NO: 311 - protein, 221 aa, Artificial Sequence
  Description of Artificial Sequence: Synthetic polypeptide
DIQMTQSPSSLSASVGDRVTITCRASQYFSSYLAWYQQKPGKAPKLLIYGASSRASGVPSRFSGSGSGTDFTLTISSLQPEDFATYYCQQYLGSPPTFGQGTKVEIKRTVAAPDIQMTQSPSSLSASVGDRVTITCRASQSISNNLNWYQQKPGKAPKLLIYYTSRFHSGVPSRFSGSGSGTDFTFTISSLQPEDIATYYCQQEHTLPYTFGQGTKLEIKR

SEQ ID NO: 312 - protein, 246 aa, Artificial Sequence; identical to SEQ ID NO: 244
  Description of Artificial Sequence: Synthetic polypeptide

SEQ ID NO: 313 - protein, 220 aa, Artificial Sequence
  Description of Artificial Sequence: Synthetic polypeptide
DIQMTQSPSSLSASVGDRVTITCRASQSISNNLNWYQQKPGKAPKLLIYYTSRFHSGVPSRFSGSGSGTDFTFTISSLQPEDIATYYCQQEHTLPYTFGQGTKLEIKRTVAAPQIVLTQSPAIMSASPGEKVTMTCSASSSVSYMNWYQQKSGTSPKRWIYDTSKLASGVPAHFRGSGSGTSYSLTISGMEAEDAATYYCQQWSSNPFTFGSGTKLEINR

SEQ ID NO: 314 - protein, 246 aa, Artificial Sequence; identical to SEQ ID NO: 246
  Description of Artificial Sequence: Synthetic polypeptide

SEQ ID NO: 315 - protein, 220 aa, Artificial Sequence
  Description of Artificial Sequence: Synthetic polypeptide
QIVLTQSPAIMSASPGEKVTMTCSASSSVSYMNWYQQKSGTSPKRWIYDTSKLASGVPAHFRGSGSGTSYSLTISGMEAEDAATYYCQQWSSNPFTFGSGTKLEINRTVAAPDIQMTQSPSSLSASVGDRVTITCRASQSISNNLNWYQQKPGKAPKLLIYYTSRFHSGVPSRFSGSGSGTDFTFTISSLQPEDIATYYCQQEHTLPYTFGQGTKLEIKR

SEQ ID NO: 316 - protein, 246 aa, Artificial Sequence
  Description of Artificial Sequence: Synthetic polypeptide
QVQLQESGPGLVKPSETLSLTCTVSGFSLIGYDLNWIRQPPGKGLEWIGIIWGDGTTDYNSAVKSRVTISKDTSKNQFSLKLSSVTAADTAVYYCARGGYWYATSYYFDYWGQGTLVTVSSASTKGPEVQLLESGGGLVQPGGSLRLSCAASGFTFSHYVMAWVRQAPGKGLEWVSSISSSGGWTLYADSVKGRFTISRDNSKNTLYLQMNSLRAEDTAVYYCTRGLKMATIFDYWGQGTLVTVSS

SEQ ID NO: 317 - protein, 225 aa, Artificial Sequence
  Description of Artificial Sequence: Synthetic polypeptide
DIQMTQSPSSLSASVGDRVTITCRASQSISNNLNWYQQKPGKAPKLLIYYTSRFHSGVPSRFSGSGSGTDFTFTISSLQPEDIATYYCQQEHTLPYTFGQGTKLEIKRTVAAPQSALTQPASVSGSPGQSITISCTGTSSDVGSYNVVSWYQQHPGKAPKLIIYEVSQRPSGVSNRFSGSKSGNTASLTISGLQTEDEADYYCCSYAGSSIFVIFGGGTKVTVLG

SEQ ID NO: 318 - protein, 246 aa, Artificial Sequence
  Description of Artificial Sequence: Synthetic polypeptide
EVQLLESGGGLVQPGGSLRLSCAASGFTFSHYVMAWVRQAPGKGLEWVSSISSSGGWTLYADSVKGRFTISRDNSKNTLYLQMNSLRAEDTAVYYCTRGLKMATIFDYWGQGTLVTVSSASTKGPQVQLQESGPGLVKPSETLSLTCTVSGFSLIGYDLNWIRQPPGKGLEWIGIIWGDGTTDYNSAVKSRVTISKDTSKNQFSLKLSSVTAADTAVYYCARGGYWYATSYYFDYWGQGTLVTVSS

SEQ ID NO: 319 - protein, 226 aa, Artificial Sequence
  Description of Artificial Sequence: Synthetic polypeptide
QSALTQPASVSGSPGQSITISCTGTSSDVGSYNVVSWYQQHPGKAPKLIIYEVSQRPSGVSNRFSGSKSGNTASLTISGLQTEDEADYYCCSYAGSSIFVIFGGGTKVTVLGQPKAAPDIQMTQSPSSLSASVGDRVTITCRASQSISNNLNWYQQKPGKAPKLLIYYTSRFHSGVPSRFSGSGSGTDFTFTISSLQPEDIATYYCQQEHTLPYTFGQGTKLEIKR

SEQ ID NO: 320 - protein, 247 aa, Artificial Sequence
  Description of Artificial Sequence: Synthetic polypeptide
QVQLQESGPGLVKPSETLSLTCTVSGFSLIGYDLNWIRQPPGKGLEWIGIIWGDGTTDYNSAVKSRVTISKDTSKNQFSLKLSSVTAADTAVYYCARGGYWYATSYYFDYWGQGTLVTVSSASTKGPEVQLVESGGGLVQPGGSLRLSCAASGFTISDYWIHWVRQAPGKGLEWVAGITPAGGYTYYADSVKGRFTISADTSKNTAYLQMNSLRAEDTAVYYCARFVFFLPYAMDYWGQGTLVTVSS

SEQ ID NO: 321 - protein, 221 aa, Artificial Sequence
  Description of Artificial Sequence: Synthetic polypeptide
DIQMTQSPSSLSASVGDRVTITCRASQSISNNLNWYQQKPGKAPKLLIYYTSRFHSGVPSRFSGSGSGTDFTFTISSLQPEDIATYYCQQEHTLPYTFGQGTKLEIKRTVAAPDIQMTQSPSSLSASVGDRVTITCRASQDVSTAVAWYQQKPGKAPKLLIYSASFLYSGVPSRFSGSGSGTDFTLTISSLQPEDFATYYCQQSYTTPPTFGQGTKVEIKR

SEQ ID NO: 322 - protein, 247 aa, Artificial Sequence
  Description of Artificial Sequence: Synthetic polypeptide
EVQLVESGGGLVQPGGSLRLSCAASGFTISDYWIHWVRQAPGKGLEWVAGITPAGGYTYYADSVKGRFTISADTSKNTAYLQMNSLRAEDTAVYYCARFVFFLPYAMDYWGQGTLVTVSSASTKGPQVQLQESGPGLVKPSETLSLTCTVSGFSLIGYDLNWIRQPPGKGLEWIGIIWGDGTTDYNSAVKSRVTISKDTSKNQFSLKLSSVTAADTAVYYCARGGYWYATSYYFDYWGQGTLVTVSS

SEQ ID NO: 323 - protein, 221 aa, Artificial Sequence
  Description of Artificial Sequence: Synthetic polypeptide
DIQMTQSPSSLSASVGDRVTITCRASQDVSTAVAWYQQKPGKAPKLLIYSASFLYSGVPSRFSGSGSGTDFTLTISSLQPEDFATYYCQQSYTTPPTFGQGTKVEIKRTVAAPDIQMTQSPSSLSASVGDRVTITCRASQSISNNLNWYQQKPGKAPKLLIYYTSRFHSGVPSRFSGSGSGTDFTFTISSLQPEDIATYYCQQEHTLPYTFGQGTKLEIKR

SEQ ID NO: 324 - protein, 248 aa, Artificial Sequence
  Description of Artificial Sequence: Synthetic polypeptide
QVQLQESGPGLVKPSETLSLTCTVSGFSLIGYDLNWIRQPPGKGLEWIGIIWGDGTTDYNSAVKSRVTISKDTSKNQFSLKLSSVTAADTAVYYCARGGYWYATSYYFDYWGQGTLVTVSSASTKGPEVQLVESGGGLVQPGGSLRLSCAASGFTINASWIHWVRQAPGKGLEWVGAIYPYSGYTNYADSVKGRFTISADTSKNTAYLQMNSLRAEDTAVYYCARWGHSTSPWAMDYWGQGTLVTVSS

SEQ ID NO: 325 - protein, 221 aa, Artificial Sequence
  Description of Artificial Sequence: Synthetic polypeptide
DIQMTQSPSSLSASVGDRVTITCRASQSISNNLNWYQQKPGKAPKLLIYYTSRFHSGVPSRFSGSGSGTDFTFTISSLQPEDIATYYCQQEHTLPYTFGQGTKLEIKRTVAAPDIQMTQSPSSLSASVGDRVTITCRASQVIRRSLAWYQQKPGKAPKLLIYAASNLASGVPSRFSGSGSGTDFTLTISSLQPEDFATYYCQQSNTSPLTFGQGTKVEIKR

SEQ ID NO: 326 - protein, 248 aa, Artificial Sequence
  Description of Artificial Sequence: Synthetic polypeptide
EVQLVESGGGLVQPGGSLRLSCAASGFTINASWIHWVRQAPGKGLEWVGAIYPYSGYTNYADSVKGRFTISADTSKNTAYLQMNSLRAEDTAVYYCARWGHSTSPWAMDYWGQGTLVTVSSASTKGPQVQLQESGPGLVKPSETLSLTCTVSGFSLIGYDLNWIRQPPGKGLEWIGIIWGDGTTDYNSAVKSRVTISKDTSKNQFSLKLSSVTAADTAVYYCARGGYWYATSYYFDYWGQGTLVTVSS

SEQ ID NO: 327 - protein, 221 aa, Artificial Sequence
  Description of Artificial Sequence: Synthetic polypeptide
DIQMTQSPSSLSASVGDRVTITCRASQVIRRSLAWYQQKPGKAPKLLIYAASNLASGVPSRFSGSGSGTDFTLTISSLQPEDFATYYCQQSNTSPLTFGQGTKVEIKRTVAAPDIQMTQSPSSLSASVGDRVTITCRASQSISNNLNWYQQKPGKAPKLLIYYTSRFHSGVPSRFSGSGSGTDFTFTISSLQPEDIATYYCQQEHTLPYTFGQGTKLEIKR

SEQ ID NO: 328 - protein, 250 aa, Artificial Sequence
  Description of Artificial Sequence: Synthetic polypeptide
QVQLQESGPGLVKPSETLSLTCTVSGFSLIGYDLNWIRQPPGKGLEWIGIIWGDGTTDYNSAVKSRVTISKDTSKNQFSLKLSSVTAADTAVYYCARGGYWYATSYYFDYWGQGTLVTVSSASTKGPEVQLVESGGGLVQPGGSLRLSCAASGYDFTHYGMNWVRQAPGKGLEWVGWINTYTGEPTYAADFKRRFTFSLDTSKSTAYLQMNSLRAEDTAVYYCAKYPYYYGTSHWYFDVWGQGTLVTVSS

SEQ ID NO: 329 - protein, 221 aa, Artificial Sequence
  Description of Artificial Sequence: Synthetic polypeptide
DIQMTQSPSSLSASVGDRVTITCRASQSISNNLNWYQQKPGKAPKLLIYYTSRFHSGVPSRFSGSGSGTDFTFTISSLQPEDIATYYCQQEHTLPYTFGQGTKLEIKRTVAAPDIQLTQSPSSLSASVGDRVTITCSASQDISNYLNWYQQKPGKAPKVLIYFTSSLHSGVPSRFSGSGSGTDFTLTISSLQPEDFATYYCQQYSTVPWTFGQGTKVEIKR

SEQ ID NO: 330 - protein, 250 aa, Artificial Sequence
  Description of Artificial Sequence: Synthetic polypeptide
EVQLVESGGGLVQPGGSLRLSCAASGYDFTHYGMNWVRQAPGKGLEWVGWINTYTGEPTYAADFKRRFTFSLDTSKSTAYLQMNSLRAEDTAVYYCAKYPYYYGTSHWYFDVWGQGTLVTVSSASTKGPQVQLQESGPGLVKPSETLSLTCTVSGFSLIGYDLNWIRQPPGKGLEWIGIIWGDGTTDYNSAVKSRVTISKDTSKNQFSLKLSSVTAADTAVYYCARGGYWYATSYYFDYWGQGTLVTVSS

SEQ ID NO: 331 - protein, 221 aa, Artificial Sequence
  Description of Artificial Sequence: Synthetic polypeptide
DIQLTQSPSSLSASVGDRVTITCSASQDISNYLNWYQQKPGKAPKVLIYFTSSLHSGVPSRFSGSGSGTDFTLTISSLQPEDFATYYCQQYSTVPWTFGQGTKVEIKRTVAAPDIQMTQSPSSLSASVGDRVTITCRASQSISNNLNWYQQKPGKAPKLLIYYTSRFHSGVPSRFSGSGSGTDFTFTISSLQPEDIATYYCQQEHTLPYTFGQGTKLEIKR

SEQ ID NO: 332 - protein, 243 aa, Artificial Sequence
  Description of Artificial Sequence: Synthetic polypeptide
QVQLQESGPGLVKPSETLSLTCTVSGFSLIGYDLNWIRQPPGKGLEWIGIIWGDGTTDYNSAVKSRVTISKDTSKNQFSLKLSSVTAADTAVYYCARGGYWYATSYYFDYWGQGTLVTVSSASTKGPQVQLQESGPGLVKPSQTLSLTCTVSGYSISSDFAWNWIRQPPGKGLEWMGYISYSGNTRYQPSLKSRITISRDTSKNQFFLKLNSVTAADTATYYCVTAGRGFPYWGQGTLVTVSS

SEQ ID NO: 333 - protein, 221 aa, Artificial Sequence
  Description of Artificial Sequence: Synthetic polypeptide
DIQMTQSPSSLSASVGDRVTITCRASQSISNNLNWYQQKPGKAPKLLIYYTSRFHSGVPSRFSGSGSGTDFTFTISSLQPEDIATYYCQQEHTLPYTFGQGTKLEIKRTVAAPDIQMTQSPSSMSVSVGDRVTITCHSSQDINSNIGWLQQKPGKSFKGLIYHGTNLDDGVPSRFSGSGSGTDYTLTISSLQPEDFATYYCVQYAQFPWTFGGGTKLEIKR

SEQ ID NO: 334 - protein, 243 aa, Artificial Sequence
  Description of Artificial Sequence: Synthetic polypeptide
QVQLQESGPGLVKPSQTLSLTCTVSGYSISSDFAWNWIRQPPGKGLEWMGYISYSGNTRYQPSLKSRITISRDTSKNQFFLKLNSVTAADTATYYCVTAGRGFPYWGQGTLVTVSSASTKGPQVQLQESGPGLVKPSETLSLTCTVSGFSLIGYDLNWIRQPPGKGLEWIGIIWGDGTTDYNSAVKSRVTISKDTSKNQFSLKLSSVTAADTAVYYCARGGYWYATSYYFDYWGQGTLVTVSS

SEQ ID NO: 335 - protein, 221 aa, Artificial Sequence
  Description of Artificial Sequence: Synthetic polypeptide
DIQMTQSPSSMSVSVGDRVTITCHSSQDINSNIGWLQQKPGKSFKGLIYHGTNLDDGVPSRFSGSGSGTDYTLTISSLQPEDFATYYCVQYAQFPWTFGGGTKLEIKRTVAAPDIQMTQSPSSLSASVGDRVTITCRASQSISNNLNWYQQKPGKAPKLLIYYTSRFHSGVPSRFSGSGSGTDFTFTISSLQPEDIATYYCQQEHTLPYTFGQGTKLEIKR

SEQ ID NO: 336 - DNA, 7185 bp, Artificial Sequence
  Description of Artificial Sequence: Synthetic polynucleotide
gcgtcgaccaagggcccatcggtcttccccctggcaccctcctccaagagcacctctgggggcacagcggccctgggctgcctggtcaaggactacttccccgaaccggtgacggtgtcgtggaactcaggcgccctgaccagcggcgtgcacaccttcccggctgtcctacagtcctcaggactctactccctcagcagcgtggtgaccgtgccctccagcagcttgggcacccagacctacatctgcaacgtgaatcacaagcccagcaacaccaaggtggacaagaaagttgagcccaaatcttgtgacaaaactcacacatgcccaccgtgcccagcacctgaactcctggggggaccgtcagtcttcctcttccccccaaaacccaaggacaccctcatgatctcccggacccctgaggtcacatgcgtggtggtggacgtgagccacgaagaccctgaggtcaagttcaactggtacgtggacggcgtggaggtgcataatgccaagacaaagccgcgggaggagcagtacaacagcacgtaccgtgtggtcagcgtcctcaccgtcctgcaccaggactggctgaatggcaaggagtacaagtgcaaggtctccaacaaagccctcccagcccccatcgagaaaaccatctccaaagccaaagggcagccccgagaaccacaggtgtacaccctgcccccatcccgcgaggagatgaccaagaaccaggtcagcctgacctgcctggtcaaaggcttctatcccagcgacatcgccgtggagtgggagagcaatgggcagccggagaacaactacaagaccacgcctcccgtgctggactccgacggctccttcttcctctacagcaagctcaccgtggacaagagcaggtggcagcaggggaacgtcttctcatgctccgtgatgcatgaggctctgcacaaccactacacgcagaagagcctctccctgtctccgggtaaatgagcggccgctcgaggccggcaaggccggatcccccgacctcgacctctggctaataaaggaaatttattttcattgcaatagtgtgttggaattttttgtgtctctcactcggaaggacatatgggagggcaaatcatttggtcgagatccctcggagatctctagctagaggatcgatccccgccccggacgaactaaacctgactacgacatctctgccccttcttcgcggggcagtgcatgtaatcccttcagttggttggtacaacttgccaactgggccctgttccacatgtgacacggggggggaccaaacacaaaggggttctctgactgtagttgacatccttataaatggatgtgcacatttgccaacactgagtggctttcatcctggagcagactttgcagtctgtggactgcaacacaacattgcctttatgtgtaactcttggctgaagctcttacaccaatgctgggggacatgtacctcccaggggcccaggaagactacgggaggctacaccaacgtcaatcagaggggcctgtgtagctaccgataagcggaccctcaagagggcattagcaatagtgtttataaggcccccttgttaaccctaaacgggtagcatatgcttcccgggtagtagtatatactatccagactaaccctaattcaatagcatatgttacccaacgggaagcatatgctatcgaattagggttagtaaaagggtcctaaggaacagcgatatctcccaccccatgagctgtcacggttttatttacatggggtcaggattccacgagggtagtgaaccattttagtcacaagggcagtggctgaagatcaaggagcgggcagtgaactctcctgaatcttcgcctgcttcttcattctccttcgtttagctaatagaataactgctgagttgtgaacagtaaggtgtatgtgaggtgctcgaaaacaaggtttcaggtgacgcccccagaataaaatttggacggggggttcagtggtggcattgtgctatgacaccaatataaccctcacaaaccccttgggcaataaatactagtgtaggaatgaaacattctgaatatctttaacaatagaaatccatggggtggggacaagccgtaaagactggatgtccatctcacacgaatttatggctatgggcaacacataatcctagtgcaatatgatactggggttattaagatgtgtcccaggcagggaccaagacaggtgaaccatgttgttacactctatttgtaacaaggggaaagagagtggacgccgacagcagcggactccactggttgtctctaacacccccgaaaattaaacggggctccacgccaatggggcccataaacaaagacaagtggccactcttttttttgaaattgtggagtgggggcacgcgtcagcccccacacgccgccctgcggttttggactgtaaaataagggtgtaataacttggctgattgtaaccccgctaaccactgcggtcaaaccacttgcccacaaaaccactaatggcaccccggggaatacctgcataagtaggtgggcgggccaagataggggcgcgattgctgcgatctggaggacaaattacacacacttgcgcctgagcgccaagcacagggttgttggtcctcatattcacgaggtcgctgagagcacggtgggctaatgttgccatgggtagcatatactacccaaatatctggatagcatatgctatcctaatctatatctgggtagcataggctatcctaatctatatctgggtagcatatgctatcctaatctatatctgggtagtatatgctatcctaatttatatctgggtagcataggctatcctaatctatatctgggtagcatatgctatcctaatctatatctgggtagtatatgctatcctaatctgtatccgggtagcatatgctatcctaatagagattagggtagtatatgctatcctaatttatatctgggtagcatatactacccaaatatctggatagcatatgctatcctaatctatatctgggtagcatatgctatcctaatctatatctgggtagcataggctatcctaatctatatctgggtagcatatgctatcctaatctatatctgggtagtatatgctatcctaatttatatctgggtagcataggctatcctaatctatatctgggtagcatatgctatcctaatctatatctgggtagtatatgctatcctaatctgtatccgggtagcatatgctatcctcatgataagctgtcaaacatgagaattttcttgaagacgaaagggcctcgtgatacgcctatttttataggttaatgtcatgataataatggtttcttagacgtcaggtggcacttttcggggaaatgtgcgcggaacccctatttgtttatttttctaaatacattcaaatatgtatccgctcatgagacaataaccctgataaatgcttcaataatattgaaaaaggaagagtatgagtattcaacatttccgtgtcgcccttattcccttttttgcggcattttgccttcctgtttttgctcacccagaaacgctggtgaaagtaaaagatgctgaagatcagttgggtgcacgagtgggttacatcgaactggatctcaacagcggtaagatccttgagagttttcgccccgaagaacgttttccaatgatgagcacttttaaagttctgctatgtggcgcggtattatcccgtgttgacgccgggcaagagcaactcggtcgccgcatacactattctcagaatgacttggttgagtactcaccagtcacagaaaagcatcttacggatggcatgacagtaagagaattatgcagtgctgccataaccatgagtgataacactgcggccaacttacttctgacaacgatcggaggaccgaaggagctaaccgcttttttgcacaacatgggggatcatgtaactcgccttgatcgttgggaaccggagctgaatgaagccataccaaacgacgagcgtgacaccacgatgcctgcagcaatggcaacaacgttgcgcaaactattaactggcgaactacttactctagcttcccggcaacaattaatagactggatggaggcggataaagttgcaggaccacttctgcgctcggcccttccggctggctggtttattgctgataaatctggagccggtgagcgtgggtctcgcggtatcattgcagcactggggccagatggtaagccctcccgtatcgtagttatctacacgacggggagtcaggcaactatggatgaacgaaatagacagatcgctgagataggtgcctcactgattaagcattggtaactgtcagaccaagtttactcatatatactttagattgatttaaaacttcatttttaatttaaaaggatctaggtgaagatcctttttgataatctcatgaccaaaatcccttaacgtgagttttcgttccactgagcgtcagaccccgtagaaaagatcaaaggatcttcttgagatcctttttttctgcgcgtaatctgctgcttgcaaacaaaaaaaccaccgctaccagcggtggtttgtttgccggatcaagagctaccaactctttttccgaaggtaactggcttcagcagagcgcagataccaaatactgttcttctagtgtagccgtagttaggccaccacttcaagaactctgtagcaccgcctacatacctcgctctgctaatcctgttaccagtggctgctgccagtggcgataagtcgtgtcttaccgggttggactcaagacgatagttaccggataaggcgcagcggtcgggctgaacggggggttcgtgcacacagcccagcttggagcgaacgacctacaccgaactgagatacctacagcgtgagctatgagaaagcgccacgcttcccgaagggagaaaggcggacaggtatccggtaagcggcagggtcggaacaggagagcgcacgagggagcttccagggggaaacgcctggtatctttatagtcctgtcgggtttcgccacctctgacttgagcgtcgatttttgtgatgctcgtcaggggggcggagcctatggaaaaacgccagcaacgcggcctttttacggttcctggccttttgctggccttttgctcacatgttctttcctgcgttatcccctgattctgtggataaccgtattaccgcctttgagtgagctgataccgctcgccgcagccgaacgaccgagcgcagcgagtcagtgagcgaggaagcggaagagcgcccaatacgcaaaccgcctctccccgcgcgttggccgattcattaatgcagctggcacgacaggtttcccgactggaaagcgggcagtgagcgcaacgcaattaatgtgagttagctcactcattaggcaccccaggctttacactttatgcttccggctcgtatgttgtgtggaattgtgagcggataacaatttcacacaggaaacagctatgaccatgattacgccaagctctagctagaggtcgagtccctccccagcaggcagaagtatgcaaagcatgcatctcaattagtcagcaaccatagtcccgcccctaactccgcccatcccgcccctaactccgcccagttccgcccattctccgccccatggctgactaattttttttatttatgcagaggccgaggccgcctcggcctctgagctattccagaagtagtgaggaggcttttttggaggcctaggcttttgcaaaaagctttgcaaagatggataaagttttaaacagagaggaatctttgcagctaatggaccttctaggtcttgaaaggagtgggaattggctccggtgcccgtcagtgggcagagcgcacatcgcccacagtccccgagaagttggggggaggggtcggcaattgaaccggtgcctagagaaggtggcgcggggtaaactgggaaagtgatgtcgtgtactggctccgcctttttcccgagggtgggggagaaccgtatataagtgcagtagtcgccgtgaacgttctttttcgcaacgggtttgccgccagaacacaggtaagtgccgtgtgtggttcccgcgggcctggcctctttacgggttatggcccttgcgtgccttgaattacttccacctggctgcagtacgtgattcttgatcccgagcttcgggttggaagtgggtgggagagttcgaggccttgcgcttaaggagccccttcgcctcgtgcttgagttgaggcctggcctgggcgctggggccgccgcgtgcgaatctggtggcaccttcgcgcctgtctcgctgctttcgataagtctctagccatttaaaatttttgatgacctgctgcgacgctttttttctggcaagatagtcttgtaaatgcgggccaagatctgcacactggtatttcggtttttggggccgcgggcggcgacggggcccgtgcgtcccagcgcacatgttcggcgaggcggggcctgcgagcgcggccaccgagaatcggacgggggtagtctcaagctggccggcctgctctggtgcctggcctcgcgccgccgtgtatcgccccgccctgggcggcaaggctggcccggtcggcaccagttgcgtgagcggaaagatggccgcttcccggccctgctgcagggagctcaaaatggaggacgcggcgctcgggagagcgggcgggtgagtcacccacacaaaggaaaagggcctttccgtcctcagccgtcgcttcatgtgactccacggagtaccgggcgccgtccaggcacctcgattagttctcgagcttttggagtacgtcgtctttaggttggggggaggggttttatgcgatggagtttccccacactgagtgggtggagactgaagttaggccagcttggcacttgatgtaattctccttggaatttgccctttttgagtttggatcttggttcattctcaagcctcagacagtggttcaaagtttttttcttccatttcaggtgtcgtgaggaattctctagagatccctcgacctcgagatccattgtgcccgggcgccaccatggagtttgggctgagctggctttttcttgtcgcgattttaaaaggtgtccagtgc

SEQ ID NO: 337 - DNA, 6521 bp, Artificial Sequence
  Description of Artificial Sequence: Synthetic polynucleotide
acggtggctgcaccatctgtcttcatcttcccgccatctgatgagcagttgaaatctggaactgcctctgttgtgtgcctgctgaataacttctatcccagagaggccaaagtacagtggaaggtggataacgccctccaatcgggtaactcccaggagagtgtcacagagcaggacagcaaggacagcacctacagcctcagcagcaccctgacgctgagcaaagcagactacgagaaacacaaagtctacgcctgcgaagtcacccatcagggcctgagctcgcccgtcacaaagagcttcaacaggggagagtgttgagcggccgctcgaggccggcaaggccggatcccccgacctcgacctctggctaataaaggaaatttattttcattgcaatagtgtgttggaattttttgtgtctctcactcggaaggacatatgggagggcaaatcatttggtcgagatccctcggagatctctagctagaggatcgatccccgccccggacgaactaaacctgactacgacatctctgccccttcttcgcggggcagtgcatgtaatcccttcagttggttggtacaacttgccaactgggccctgttccacatgtgacacggggggggaccaaacacaaaggggttctctgactgtagttgacatccttataaatggatgtgcacatttgccaacactgagtggctttcatcctggagcagactttgcagtctgtggactgcaacacaacattgcctttatgtgtaactcttggctgaagctcttacaccaatgctgggggacatgtacctcccaggggcccaggaagactacgggaggctacaccaacgtcaatcagaggggcctgtgtagctaccgataagcggaccctcaagagggcattagcaatagtgtttataaggcccccttgttaaccctaaacgggtagcatatgcttcccgggtagtagtatatactatccagactaaccctaattcaatagcatatgttacccaacgggaagcatatgctatcgaattagggttagtaaaagggtcctaaggaacagcgatatctcccaccccatgagctgtcacggttttatttacatggggtcaggattccacgagggtagtgaaccattttagtcacaagggcagtggctgaagatcaaggagcgggcagtgaactctcctgaatcttcgcctgcttcttcattctccttcgtttagctaatagaataactgctgagttgtgaacagtaaggtgtatgtgaggtgctcgaaaacaaggtttcaggtgacgcccccagaataaaatttggacggggggttcagtggtggcattgtgctatgacaccaatataaccctcacaaaccccttgggcaataaatactagtgtaggaatgaaacattctgaatatctttaacaatagaaatccatggggtggggacaagccgtaaagactggatgtccatctcacacgaatttatggctatgggcaacacataatcctagtgcaatatgatactggggttattaagatgtgtcccaggcagggaccaagacaggtgaaccatgttgttacactctatttgtaacaaggggaaagagagtggacgccgacagcagcggactccactggttgtctctaacacccccgaaaattaaacggggctccacgccaatggggcccataaacaaagacaagtggccactcttttttttgaaattgtggagtgggggcacgcgtcagcccccacacgccgccctgcggttttggactgtaaaataagggtgtaataacttggctgattgtaaccccgctaaccactgcggtcaaaccacttgcccacaaaaccactaatggcaccccggggaatacctgcataagtaggtgggcgggccaagataggggcgcgattgctgcgatctggaggacaaattacacacacttgcgcctgagcgccaagcacagggttgttggtcctcatattcacgaggtcgctgagagcacggtgggctaatgttgccatgggtagcatatactacccaaatatctggatagcatatgctatcctaatctatatctgggtagcataggctatcctaatctatatctgggtagcatatgctatcctaatctatatctgggtagtatatgctatcctaatttatatctgggtagcataggctatcctaatctatatctgggtagcatatgctatcctaatctatatctgggtagtatatgctatcctaatctgtatccgggtagcatatgctatcctaatagagattagggtagtatatgctatcctaatttatatctgggtagcatatactacccaaatatctggatagcatatgctatcctaatctatatctgggtagcatatgctatcctaatctatatctgggtagcataggctatcctaatctatatctgggtagcatatgctatcctaatctatatctgggtagtatatgctatcctaatttatatctgggtagcataggctatcctaatctatatctgggtagcatatgctatcctaatctatatctgggtagtatatgctatcctaatctgtatccgggtagcatatgctatcctcatgataagctgtcaaacatgagaattttcttgaagacgaaagggcctcgtgatacgcctatttttataggttaatgtcatgataataatggtttcttagacgtcaggtggcacttttcggggaaatgtgcgcggaacccctatttgtttatttttctaaatacattcaaatatgtatccgctcatgagacaataaccctgataaatgcttcaataatattgaaaaaggaagagtatgagtattcaacatttccgtgtcgcccttattcccttttttgcggcattttgccttcctgtttttgctcacccagaaacgctggtgaaagtaaaagatgctgaagatcagttgggtgcacgagtgggttacatcgaactggatctcaacagcggtaagatccttgagagttttcgccccgaagaacgttttccaatgatgagcacttttaaagttctgctatgtggcgcggtattatcccgtgttgacgccgggcaagagcaactcggtcgccgcatacactattctcagaatgacttggttgagtactcaccagtcacagaaaagcatcttacggatggcatgacagtaagagaattatgcagtgctgccataaccatgagtgataacactgcggccaacttacttctgacaacgatcggaggaccgaaggagctaaccgcttttttgcacaacatgggggatcatgtaactcgccttgatcgttgggaaccggagctgaatgaagccataccaaacgacgagcgtgacaccacgatgcctgcagcaatggcaacaacgttgcgcaaactattaactggcgaactacttactctagcttcccggcaacaattaatagactggatggaggcggataaagttgcaggaccacttctgcgctcggcccttccggctggctggtttattgctgataaatctggagccggtgagcgtgggtctcgcggtatcattgcagcactggggccagatggtaagccctcccgtatcgtagttatctacacgacggggagtcaggcaactatggatgaacgaaatagacagatcgctgagataggtgcctcactgattaagcattggtaactgtcagaccaagtttactcatatatactttagattgatttaaaacttcatttttaatttaaaaggatctaggtgaagatcctttttgataatctcatgaccaaaatcccttaacgtgagttttcgttccactgagcgtcagaccccgtagaaaagatcaaaggatcttcttgagatcctttttttctgcgcgtaatctgctgcttgcaaacaaaaaaaccaccgctaccagcggtggtttgtttgccggatcaagagctaccaactctttttccgaaggtaactggcttcagcagagcgcagataccaaatactgttcttctagtgtagccgtagttaggccaccacttcaagaactctgtagcaccgcctacatacctcgctctgctaatcctgttaccagtggctgctgccagtggcgataagtcgtgtcttaccgggttggactcaagacgatagttaccggataaggcgcagcggtcgggctgaacggggggttcgtgcacacagcccagcttggagcgaacgacctacaccgaactgagatacctacagcgtgagctatgagaaagcgccacgcttcccgaagggagaaaggcggacaggtatccggtaagcggcagggtcggaacaggagagcgcacgagggagcttccagggggaaacgcctggtatctttatagtcctgtcgggtttcgccacctctgacttgagcgtcgatttttgtgatgctcgtcaggggggcggagcctatggaaaaacgccagcaacgcggcctttttacggttcctggccttttgctggccttttgctcacatgttctttcctgcgttatcccctgattctgtggataaccgtattaccgcctttgagtgagctgataccgctcgccgcagccgaacgaccgagcgcagcgagtcagtgagcgaggaagcggaagagcgcccaatacgcaaaccgcctctccccgcgcgttggccgattcattaatgcagctggcacgacaggtttcccgactggaaagcgggcagtgagcgcaacgcaattaatgtgagttagctcactcattaggcaccccaggctttacactttatgcttccggctcgtatgttgtgtggaattgtgagcggataacaatttcacacaggaaacagctatgaccatgattacgccaagctctagctagaggtcgagtccctccccagcaggcagaagtatgcaaagcatgcatctcaattagtcagcaaccatagtcccgcccctaactccgcccatcccgcccctaactccgcccagttccgcccattctccgccccatggctgactaattttttttatttatgcagaggccgaggccgcctcggcctctgagctattccagaagtagtgaggaggcttttttggaggcctaggcttttgcaaaaagctttgcaaagatggataaagttttaaacagagaggaatctttgcagctaatggaccttctaggtcttgaaaggagtgggaattggctccggtgcccgtcagtgggcagagcgcacatcgcccacagtccccgagaagttggggggaggggtcggcaattgaaccggtgcctagagaaggtggcgcggggtaaactgggaaagtgatgtcgtgtactggctccgcctttttcccgagggtgggggagaaccgtatataagtgcagtagtcgccgtgaacgttctttttcgcaacgggtttgccgccagaacacaggtaagtgccgtgtgtggttcccgcgggcctggcctctttacgggttatggcccttgcgtgccttgaattacttccacctggctgcagtacgtgattcttgatcccgagcttcgggttggaagtgggtgggagagttcgaggccttgcgcttaaggagccccttcgcctcgtgcttgagttgaggcctggcctgggcgctggggccgccgcgtgcgaatctggtggcaccttcgcgcctgtctcgctgctttcgataagtctctagccatttaaaatttttgatgacctgctgcgacgctttttttctggcaagatagtcttgtaaatgcgggccaagatctgcacactggtatttcggtttttggggccgcgggcggcgacggggcccgtgcgtcccagcgcacatgttcggcgaggcggggcctgcgagcgcggccaccgagaatcggacgggggtagtctcaagctggccggcctgctctggtgcctggcctcgcgccgccgtgtatcgccccgccctgggcggcaaggctggcccggtcggcaccagttgcgtgagcggaaagatggccgcttcccggccctgctgcagggagctcaaaatggaggacgcggcgctcgggagagcgggcgggtgagtcacccacacaaaggaaaagggcctttccgtcctcagccgtcgcttcatgtgactccacggagtaccgggcgccgtccaggcacctcgattagttctcgagcttttggagtacgtcgtctttaggttggggggaggggttttatgcgatggagtttccccacactgagtgggtggagactgaagttaggccagcttggcacttgatgtaattctccttggaatttgccctttttgagtttggatcttggttcattctcaagcctcagacagtggttcaaagtttttttcttccatttcaggtgtcgtgaggaattctctagagatccctcgacctcgagatccattgtgcccgggcgcaccatggacatgcgcgtgcccgcccagctgctgggcctgctgctgctgtggttccccggctcgcgatgc

SEQ ID NO: 338 - DNA, 6513 bp, Artificial Sequence
  Description of Artificial Sequence: Synthetic polynucleotide
caacccaaggctgccccctcggtcactctgttcccgccctcctctgaggagcttcaagccaacaaggccacactggtgtgtctcataagtgacttctacccgggagccgtgacagtggcctggaaggcagatagcagccccgtcaaggcgggagtggagaccaccacaccctccaaacaaagcaacaacaagtacgcggccagcagctacctgagcctgacgcctgagcagtggaagtcccacagaagctacagctgccaggtcacgcatgaagggagcaccgtggagaagacagtggcccctacagaatgttcatgagcggccgctcgaggccggcaaggccggatcccccgacctcgacctctggctaataaaggaaatttattttcattgcaatagtgtgttggaattttttgtgtctctcactcggaaggacatatgggagggcaaatcatttggtcgagatccctcggagatctctagctagaggatcgatccccgccccggacgaactaaacctgactacgacatctctgccccttcttcgcggggcagtgcatgtaatcccttcagttggttggtacaacttgccaactgggccctgttccacatgtgacacggggggggaccaaacacaaaggggttctctgactgtagttgacatccttataaatggatgtgcacatttgccaacactgagtggctttcatcctggagcagactttgcagtctgtggactgcaacacaacattgcctttatgtgtaactcttggctgaagctcttacaccaatgctgggggacatgtacctcccaggggcccaggaagactacgggaggctacaccaacgtcaatcagaggggcctgtgtagctaccgataagcggaccctcaagagggcattagcaatagtgtttataaggcccccttgttaaccctaaacgggtagcatatgcttcccgggtagtagtatatactatccagactaaccctaattcaatagcatatgttacccaacgggaagcatatgctatcgaattagggttagtaaaagggtcctaaggaacagcgatatctcccaccccatgagctgtcacggttttatttacatggggtcaggattccacgagggtagtgaaccattttagtcacaagggcagtggctgaagatcaaggagcgggcagtgaactctcctgaatcttcgcctgcttcttcattctccttcgtttagctaatagaataactgctgagttgtgaacagtaaggtgtatgtgaggtgctcgaaaacaaggtttcaggtgacgcccccagaataaaatttggacggggggttcagtggtggcattgtgctatgacaccaatataaccctcacaaaccccttgggcaataaatactagtgtaggaatgaaacattctgaatatctttaacaatagaaatccatggggtggggacaagccgtaaagactggatgtccatctcacacgaatttatggctatgggcaacacataatcctagtgcaatatgatactggggttattaagatgtgtcccaggcagggaccaagacaggtgaaccatgttgttacactctatttgtaacaaggggaaagagagtggacgccgacagcagcggactccactggttgtctctaacacccccgaaaattaaacggggctccacgccaatggggcccataaacaaagacaagtggccactcttttttttgaaattgtggagtgggggcacgcgtcagcccccacacgccgccctgcggttttggactgtaaaataagggtgtaataacttggctgattgtaaccccgctaaccactgcggtcaaaccacttgcccacaaaaccactaatggcaccccggggaatacctgcataagtaggtgggcgggccaagataggggcgcgattgctgcgatctggaggacaaattacacacacttgcgcctgagcgccaagcacagggttgttggtcctcatattcacgaggtcgctgagagcacggtgggctaatgttgccatgggtagcatatactacccaaatatctggatagcatatgctatcctaatctatatctgggtagcataggctatcctaatctatatctgggtagcatatgctatcctaatctatatctgggtagtatatgctatcctaatttatatctgggtagcataggctatcctaatctatatctgggtagcatatgctatcctaatctatatctgggtagtatatgctatcctaatctgtatccgggtagcatatgctatcctaatagagattagggtagtatatgctatcctaatttatatctgggtagcatatactacccaaatatctggatagcatatgctatcctaatctatatctgggtagcatatgctatcctaatctatatctgggtagcataggctatcctaatctatatctgggtagcatatgctatcctaatctatatctgggtagtatatgctatcctaatttatatctgggtagcataggctatcctaatctatatctgggtagcatatgctatcctaatctatatctgggtagtatatgctatcctaatctgtatccgggtagcatatgctatcctcatgataagctgtcaaacatgagaattttcttgaagacgaaagggcctcgtgatacgcctatttttataggttaatgtcatgataataatggtttcttagacgtcaggtggcacttttcggggaaatgtgcgcggaacccctatttgtttatttttctaaatacattcaaatatgtatccgctcatgagacaataaccctgataaatgcttcaataatattgaaaaaggaagagtatgagtattcaacatttccgtgtcgcccttattcccttttttgcggcattttgccttcctgtttttgctcacccagaaacgctggtgaaagtaaaagatgctgaagatcagttgggtgcacgagtgggttacatcgaactggatctcaacagcggtaagatccttgagagttttcgccccgaagaacgttttccaatgatgagcacttttaaagttctgctatgtggcgcggtattatcccgtgttgacgccgggcaagagcaactcggtcgccgcatacactattctcagaatgacttggttgagtactcaccagtcacagaaaagcatcttacggatggcatgacagtaagagaattatgcagtgctgccataaccatgagtgataacactgcggccaacttacttctgacaacgatcggaggaccgaaggagctaaccgcttttttgcacaacatgggggatcatgtaactcgccttgatcgttgggaaccggagctgaatgaagccataccaaacgacgagcgtgacaccacgatgcctgcagcaatggcaacaacgttgcgcaaactattaactggcgaactacttactctagcttcccggcaacaattaatagactggatggaggcggataaagttgcaggaccacttctgcgctcggcccttccggctggctggtttattgctgataaatctggagccggtgagcgtgggtctcgcggtatcattgcagcactggggccagatggtaagccctcccgtatcgtagttatctacacgacggggagtcaggcaactatggatgaacgaaatagacagatcgctgagataggtgcctcactgattaagcattggtaactgtcagaccaagtttactcatatatactttagattgatttaaaacttcatttttaatttaaaaggatctaggtgaagatcctttttgataatctcatgaccaaaatcccttaacgtgagttttcgttccactgagcgtcagaccccgtagaaaagatcaaaggatcttcttgagatcctttttttctgcgcgtaatctgctgcttgcaaacaaaaaaaccaccgctaccagcggtggtttgtttgccggatcaagagctaccaactctttttccgaaggtaactggcttcagcagagcgcagataccaaatactgttcttctagtgtagccgtagttaggccaccacttcaagaactctgtagcaccgcctacatacctcgctctgctaatcctgttaccagtggctgctgccagtggcgataagtcgtgtcttaccgggttggactcaagacgatagttaccggataaggcgcagcggtcgggctgaacggggggttcgtgcacacagcccagcttggagcgaacgacctacaccgaactgagatacctacagcgtgagctatgagaaagcgccacgcttcccgaagggagaaaggcggacaggtatccggtaagcggcagggtcggaacaggagagcgcacgagggagcttccagggggaaacgcctggtatctttatagtcctgtcgggtttcgccacctctgacttgagcgtcgatttttgtgatgctcgtcaggggggcggagcctatggaaaaacgccagcaacgcggcctttttacggttcctggccttttgctggccttttgctcacatgttctttcctgcgttatcccctgattctgtggataaccgtattaccgcctttgagtgagctgataccgctcgccgcagccgaacgaccgagcgcagcgagtcagtgagcgaggaagcggaagagcgcccaatacgcaaaccgcctctccccgcgcgttggccgattcattaatgcagctggcacgacaggtttcccgactggaaagcgggcagtgagcgcaacgcaattaatgtgagttagctcactcattaggcaccccaggctttacactttatgcttccggctcgtatgttgtgtggaattgtgagcggataacaatttcacacaggaaacagctatgaccatgattacgccaagctctagctagaggtcgagtccctccccagcaggcagaagtatgcaaagcatgcatctcaattagtcagcaaccatagtcccgcccctaactccgcccatcccgcccctaactccgcccagttccgcccattctccgccccatggctgactaattttttttatttatgcagaggccgaggccgcctcggcctctgagctattccagaagtagtgaggaggcttttttggaggcctaggcttttgcaaaaagctttgcaaagatggataaagttttaaacagagaggaatctttgcagctaatggaccttctaggtcttgaaaggagtgggaattggctccggtgcccgtcagtgggcagagcgcacatcgcccacagtccccgagaagttggggggaggggtcggcaattgaaccggtgcctagagaaggtggcgcggggtaaactgggaaagtgatgtcgtgtactggctccgcctttttcccgagggtgggggagaaccgtatataagtgcagtagtcgccgtgaacgttctttttcgcaacgggtttgccgccagaacacaggtaagtgccgtgtgtggttcccgcgggcctggcctctttacgggttatggcccttgcgtgccttgaattacttccacctggctgcagtacgtgattcttgatcccgagcttcgggttggaagtgggtgggagagttcgaggccttgcgcttaaggagccccttcgcctcgtgcttgagttgaggcctggcctgggcgctggggccgccgcgtgcgaatctggtggcaccttcgcgcctgtctcgctgctttcgataagtctctagccatttaaaatttttgatgacctgctgcgacgctttttttctggcaagatagtcttgtaaatgcgggccaagatctgcacactggtatttcggtttttggggccgcgggcggcgacggggcccgtgcgtcccagcgcacatgttcggcgaggcggggcctgcgagcgcggccaccgagaatcggacgggggtagtctcaagctggccggcctgctctggtgcctggcctcgcgccgccgtgtatcgccccgccctgggcggcaaggctggcccggtcggcaccagttgcgtgagcggaaagatggccgcttcccggccctgctgcagggagctcaaaatggaggacgcggcgctcgggagagcgggcgggtgagtcacccacacaaaggaaaagggcctttccgtcctcagccgtcgcttcatgtgactccacggagtaccgggcgccgtccaggcacctcgattagttctcgagcttttggagtacgtcgtctttaggttggggggaggggttttatgcgatggagtttccccacactgagtgggtggagactgaagttaggccagcttggcacttgatgtaattctccttggaatttgccctttttgagtttggatcttggttcattctcaagcctcagacagtggttcaaagtttttttcttccatttcaggtgtcgtgaggaattctctagagatccctcgacctcgagatccattgtgcccgggcgccaccatgacttggaccccactcctcttcctcaccctcctcctccactgcacaggaagcttatcg

SEQ ID NO: 339 - DNA, 6515 bp, Artificial Sequence
  Description of Artificial Sequence: Synthetic polynucleotide
acggtggctgcaccatctgtcttcatcttcccgccatctgatgagcagttgaaatctggaactgcctctgttgtgtgcctgctgaataacttctatcccagagaggccaaagtacagtggaaggtggataacgccctccaatcgggtaactcccaggagagtgtcacagagcaggacagcaaggacagcacctacagcctcagcagcaccctgacgctgagcaaagcagactacgagaaacacaaagtctacgcctgcgaagtcacccatcagggcctgagctcgcccgtcacaaagagcttcaacaggggagagtgttgagcggccgctcgaggccggcaaggccggatcccccgacctcgacctctggctaataaaggaaatttattttcattgcaatagtgtgttggaattttttgtgtctctcactcggaaggacatatgggagggcaaatcatttggtcgagatccctcggagatctctagctagaggatcgatccccgccccggacgaactaaacctgactacgacatctctgccccttcttcgcggggcagtgcatgtaatcccttcagttggttggtacaacttgccaactgggccctgttccacatgtgacacggggggggaccaaacacaaaggggttctctgactgtagttgacatccttataaatggatgtgcacatttgccaacactgagtggctttcatcctggagcagactttgcagtctgtggactgcaacacaacattgcctttatgtgtaactcttggctgaagctcttacaccaatgctgggggacatgtacctcccaggggcccaggaagactacgggaggctacaccaacgtcaatcagaggggcctgtgtagctaccgataagcggaccctcaagagggcattagcaatagtgtttataaggcccccttgttaaccctaaacgggtagcatatgcttcccgggtagtagtatatactatccagactaaccctaattcaatagcatatgttacccaacgggaagcatatgctatcgaattagggttagtaaaagggtcctaaggaacagcgatatctcccaccccatgagctgtcacggttttatttacatggggtcaggattccacgagggtagtgaaccattttagtcacaagggcagtggctgaagatcaaggagcgggcagtgaactctcctgaatcttcgcctgcttcttcattctccttcgtttagctaatagaataactgctgagttgtgaacagtaaggtgtatgtgaggtgctcgaaaacaaggtttcaggtgacgcccccagaataaaatttggacggggggttcagtggtggcattgtgctatgacaccaatataaccctcacaaaccccttgggcaataaatactagtgtaggaatgaaacattctgaatatctttaacaatagaaatccatggggtggggacaagccgtaaagactggatgtccatctcacacgaatttatggctatgggcaacacataatcctagtgcaatatgatactggggttattaagatgtgtcccaggcagggaccaagacaggtgaaccatgttgttacactctatttgtaacaaggggaaagagagtggacgccgacagcagcggactccactggttgtctctaacacccccgaaaattaaacggggctccacgccaatggggcccataaacaaagacaagtggccactcttttttttgaaattgtggagtgggggcacgcgtcagcccccacacgccgccctgcggttttggactgtaaaataagggtgtaataacttggctgattgtaaccccgctaaccactgcggtcaaaccacttgcccacaaaaccactaatggcaccccggggaatacctgcataagtaggtgggcgggccaagataggggcgcgattgctgcgatctggaggacaaattacacacacttgcgcctgagcgccaagcacagggttgttggtcctcatattcacgaggtcgctgagagcacggtgggctaatgttgccatgggtagcatatactacccaaatatctggatagcatatgctatcctaatctatatctgggtagcataggctatcctaatctatatctgggtagcatatgctatcctaatctatatctgggtagtatatgctatcctaatttatatctgggtagcataggctatcctaatctatatctgggtagcatatgctatcctaatctatatctgggtagtatatgctatcctaatctgtatccgggtagcatatgctatcctaatagagattagggtagtatatgctatcctaatttatatctgggtagcatatactacccaaatatctggatagcatatgctatcctaatctatatctgggtagcatatgctatcctaatctatatctgggtagcataggctatcctaatctatatctgggtagcatatgctatcctaatctatatctgggtagtatatgctatcctaatttatatctgggtagcataggctatcctaatctatatctgggtagcatatgctatcctaatctatatctgggtagtatatgctatcctaatctgtatccgggtagcatatgctatcctcatgataagctgtcaaacatgagaattttcttgaagacgaaagggcctcgtgatacgcctatttttataggttaatgtcatgataataatggtttcttagacgtcaggtggcacttttcggggaaatgtgcgcggaacccctatttgtttatttttctaaatacattcaaatatgtatccgctcatgagacaataaccctgataaatgcttcaataatattgaaaaaggaagagtatgagtattcaacatttccgtgtcgcccttattcccttttttgcggcattttgccttcctgtttttgctcacccagaaacgctggtgaaagtaaaagatgctgaagatcagttgggtgcacgagtgggttacatcgaactggatctcaacagcggtaagatccttgagagttttcgccccgaagaacgttttccaatgatgagcacttttaaagttctgctatgtggcgcggtattatcccgtgttgacgccgggcaagagcaactcggtcgccgcatacactattctcagaatgacttggttgagtactcaccagtcacagaaaagcatcttacggatggcatgacagtaagagaattatgcagtgctgccataaccatgagtgataacactgcggccaacttacttctgacaacgatcggaggaccgaaggagctaaccgcttttttgcacaacatgggggatcatgtaactcgccttgatcgttgggaaccggagctgaatgaagccataccaaacgacgagcgtgacaccacgatgcctgcagcaatggcaacaacgttgcgcaaactattaactggcgaactacttactctagcttcccggcaacaattaatagactggatggaggcggataaagttgcaggaccacttctgcgctcggcccttccggctggctggtttattgctgataaatctggagccggtgagcgtgggtctcgcggtatcattgcagcactggggccagatggtaagccctcccgtatcgtagttatctacacgacggggagtcaggcaactatggatgaacgaaatagacagatcgctgagataggtgcctcactgattaagcattggtaactgtcagaccaagtttactcatatatactttagattgatttaaaacttcatttttaatttaaaaggatctaggtgaagatcctttttgataatctcatgaccaaaatcccttaacgtgagttttcgttccactgagcgtcagaccccgtagaaaagatcaaaggatcttcttgagatcctttttttctgcgcgtaatctgctgcttgcaaacaaaaaaaccaccgctaccagcggtggtttgtttgccggatcaagagctaccaactctttttccgaaggtaactggcttcagcagagcgcagataccaaatactgttcttctagtgtagccgtagttaggccaccacttcaagaactctgtagcaccgcctacatacctcgctctgctaatcctgttaccagtggctgctgccagtggcgataagtcgtgtcttaccgggttggactcaagacgatagttaccggataaggcgcagcggtcgggctgaacggggggttcgtgcacacagcccagcttggagcgaacgacctacaccgaactgagatacctacagcgtgagctatgagaaagcgccacgcttcccgaagggagaaaggcggacaggtatccggtaagcggcagggtcggaacaggagagcgcacgagggagcttccagggggaaacgcctggtatctttatagtcctgtcgggtttcgccacctctgacttgagcgtcgatttttgtgatgctcgtcaggggggcggagcctatggaaaaacgccagcaacgcggcctttttacggttcctggccttttgctggccttttgctcacatgttctttcctgcgttatcccctgattctgtggataaccgtattaccgcctttgagtgagctgataccgctcgccgcagccgaacgaccgagcgcagcgagtcagtgagcgaggaagcggaagagcgcccaatacgcaaaccgcctctccccgcgcgttggccgattcattaatgcagctggcacgacaggtttcccgactggaaagcgggcagtgagcgcaacgcaattaatgtgagttagctcactcattaggcaccccaggctttacactttatgcttccggctcgtatgttgtgtggaattgtgagcggataacaatttcacacaggaaacagctatgaccatgattacgccaagctctagctagaggtcgagtccctccccagcaggcagaagtatgcaaagcatgcatctcaattagtcagcaaccatagtcccgcccctaactccgcccatcccgcccctaactccgcccagttccgcccattctccgccccatggctgactaattttttttatttatgcagaggccgaggccgcctcggcctctgagctattccagaagtagtgaggaggcttttttggaggcctaggcttttgcaaaaagctttgcaaagatggataaagttttaaacagagaggaatctttgcagctaatggaccttctaggtcttgaaaggagtgggaattggctccggtgcccgtcagtgggcagagcgcacatcgcccacagtccccgagaagttggggggaggggtcggcaattgaaccggtgcctagagaaggtggcgcggggtaaactgggaaagtgatgtcgtgtactggctccgcctttttcccgagggtgggggagaaccgtatataagtgcagtagtcgccgtgaacgttctttttcgcaacgggtttgccgccagaacacaggtaagtgccgtgtgtggttcccgcgggcctggcctctttacgggttatggcccttgcgtgccttgaattacttccacctggctgcagtacgtgattcttgatcccgagcttcgggttggaagtgggtgggagagttcgaggccttgcgcttaaggagccccttcgcctcgtgcttgagttgaggcctggcctgggcgctggggccgccgcgtgcgaatctggtggcaccttcgcgcctgtctcgctgctttcgataagtctctagccatttaaaatttttgatgacctgctgcgacgctttttttctggcaagatagtcttgtaaatgcgggccaagatctgcacactggtatttcggtttttggggccgcgggcggcgacggggcccgtgcgtcccagcgcacatgttcggcgaggcggggcctgcgagcgcggccaccgagaatcggacgggggtagtctcaagctggccggcctgctctggtgcctggcctcgcgccgccgtgtatcgccccgccctgggcggcaaggctggcccggtcggcaccagttgcgtgagcggaaagatggccgcttcccggccctgctgcagggagctcaaaatggaggacgcggcgctcgggagagcgggcgggtgagtcacccacacaaaggaaaagggcctttccgtcctcagccgtcgcttcatgtgactccacggagtaccgggcgccgtccaggcacctcgattagttctcgagcttttggagtacgtcgtctttaggttggggggaggggttttatgcgatggagtttccccacactgagtgggtggagactgaagttaggccagcttggcacttgatgtaattctccttggaatttgccctttttgagtttggatcttggttcattctcaagcctcagacagtggttcaaagtttttttcttccatttcaggtgtcgtgaggaattctctagagatccctcgacctcgagatccattgtgcccgggcgcaccatgacttggaccccactcctcttcctcaccctcctcctccactgcacaggaagcttatcg

SEQ ID NO: 340 - DNA, 6519 bp, Artificial Sequence
  Description of Artificial Sequence: Synthetic polynucleotide
caacccaaggctgccccctcggtcactctgttcccgccctcctctgaggagcttcaagccaacaaggccacactggtgtgtctcataagtgacttctacccgggagccgtgacagtggcctggaaggcagatagcagccccgtcaaggcgggagtggagaccaccacaccctccaaacaaagcaacaacaagtacgcggccagcagctacctgagcctgacgcctgagcagtggaagtcccacagaagctacagctgccaggtcacgcatgaagggagcaccgtggagaagacagtggcccctacagaatgttcatgagcggccgctcgaggccggcaaggccggatcccccgacctcgacctctggctaataaaggaaatttattttcattgcaatagtgtgttggaattttttgtgtctctcactcggaaggacatatgggagggcaaatcatttggtcgagatccctcggagatctctagctagaggatcgatccccgccccggacgaactaaacctgactacgacatctctgccccttcttcgcggggcagtgcatgtaatcccttcagttggttggtacaacttgccaactgggccctgttccacatgtgacacggggggggaccaaacacaaaggggttctctgactgtagttgacatccttataaatggatgtgcacatttgccaacactgagtggctttcatcctggagcagactttgcagtctgtggactgcaacacaacattgcctttatgtgtaactcttggctgaagctcttacaccaatgctgggggacatgtacctcccaggggcccaggaagactacgggaggctacaccaacgtcaatcagaggggcctgtgtagctaccgataagcggaccctcaagagggcattagcaatagtgtttataaggcccccttgttaaccctaaacgggtagcatatgcttcccgggtagtagtatatactatccagactaaccctaattcaatagcatatgttacccaacgggaagcatatgctatcgaattagggttagtaaaagggtcctaaggaacagcgatatctcccaccccatgagctgtcacggttttatttacatggggtcaggattccacgagggtagtgaaccattttagtcacaagggcagtggctgaagatcaaggagcgggcagtgaactctcctgaatcttcgcctgcttcttcattctccttcgtttagctaatagaataactgctgagttgtgaacagtaaggtgtatgtgaggtgctcgaaaacaaggtttcaggtgacgcccccagaataaaatttggacggggggttcagtggtggcattgtgctatgacaccaatataaccctcacaaaccccttgggcaataaatactagtgtaggaatgaaacattctgaatatctttaacaatagaaatccatggggtggggacaagccgtaaagactggatgtccatctcacacgaatttatggctatgggcaacacataatcctagtgcaatatgatactggggttattaagatgtgtcccaggcagggaccaagacaggtgaaccatgttgttacactctatttgtaacaaggggaaagagagtggacgccgacagcagcggactccactggttgtctctaacacccccgaaaattaaacggggctccacgccaatggggcccataaacaaagacaagtggccactcttttttttgaaattgtggagtgggggcacgcgtcagcccccacacgccgccctgcggttttggactgtaaaataagggtgtaataacttggctgattgtaaccccgctaaccactgcggtcaaaccacttgcccacaaaaccactaatggcaccccggggaatacctgcataagtaggtgggcgggccaagataggggcgcgattgctgcgatctggaggacaaattacacacacttgcgcctgagcgccaagcacagggttgttggtcctcatattcacgaggtcgctgagagcacggtgggctaatgttgccatgggtagcatatactacccaaatatctggatagcatatgctatcctaatctatatctgggtagcataggctatcctaatctatatctgggtagcatatgctatcctaatctatatctgggtagtatatgctatcctaatttatatctgggtagcataggctatcctaatctatatctgggtagcatatgctatcctaatctatatctgggtagtatatgctatcctaatctgtatccgggtagcatatgctatcctaatagagattagggtagtatatgctatcctaatttatatctgggtagcatatactacccaaatatctggatagcatatgctatcctaatctatatctgggtagcatatgctatcctaatctatatctgggtagcataggctatcctaatctatatctgggtagcatatgctatcctaatctatatctgggtagtatatgctatcctaatttatatctgggtagcataggctatcctaatctatatctgggtagcatatgctatcctaatctatatctgggtagtatatgctatcctaatctgtatccgggtagcatatgctatcctcatgataagctgtcaaacatgagaattttcttgaagacgaaagggcctcgtgatacgcctatttttataggttaatgtcatgataataatggtttcttagacgtcaggtggcacttttcggggaaatgtgcgcggaacccctatttgtttatttttctaaatacattcaaatatgtatccgctcatgagacaataaccctgataaatgcttcaataatattgaaaaaggaagagtatgagtattcaacatttccgtgtcgcccttattcccttttttgcggcattttgccttcctgtttttgctcacccagaaacgctggtgaaagtaaaagatgctgaagatcagttgggtgcacgagtgggttacatcgaactggatctcaacagcggtaagatccttgagagttttcgccccgaagaacgttttccaatgatgagcacttttaaagttctgctatgtggcgcggtattatcccgtgttgacgccgggcaagagcaactcggtcgccgcatacactattctcagaatgacttggttgagtactcaccagtcacagaaaagcatcttacggatggcatgacagtaagagaattatgcagtgctgccataaccatgagtgataacactgcggccaacttacttctgacaacgatcggaggaccgaaggagctaaccgcttttttgcacaacatgggggatcatgtaactcgccttgatcgttgggaaccggagctgaatgaagccataccaaacgacgagcgtgacaccacgatgcctgcagcaatggcaacaacgttgcgcaaactattaactggcgaactacttactctagcttcccggcaacaattaatagactggatggaggcggataaagttgcaggaccacttctgcgctcggcccttccggctggctggtttattgctgataaatctggagccggtgagcgtgggtctcgcggtatcattgcagcactggggccagatggtaagccctcccgtatcgtagttatctacacgacggggagtcaggcaactatggatgaacgaaatagacagatcgctgagataggtgcctcactgattaagcattggtaactgtcagaccaagtttactcatatatactttagattgatttaaaacttcatttttaatttaaaaggatctaggtgaagatcctttttgataatctcatgaccaaaatcccttaacgtgagttttcgttccactgagcgtcagaccccgtagaaaagatcaaaggatcttcttgagatcctttttttctgcgcgtaatctgctgcttgcaaacaaaaaaaccaccgctaccagcggtggtttgtttgccggatcaagagctaccaactctttttccgaaggtaactggcttcagcagagcgcagataccaaatactgttcttctagtgtagccgtagttaggccaccacttcaagaactctgtagcaccgcctacatacctcgctctgctaatcctgttaccagtggctgctgccagtggcgataagtcgtgtcttaccgggttggactcaagacgatagttaccggataaggcgcagcggtcgggctgaacggggggttcgtgcacacagcccagcttggagcgaacgacctacaccgaactgagatacctacagcgtgagctatgagaaagcgccacgcttcccgaagggagaaaggcggacaggtatccggtaagcggcagggtcggaacaggagagcgcacgagggagcttccagggggaaacgcctggtatctttatagtcctgtcgggtttcgccacctctgacttgagcgtcgatttttgtgatgctcgtcaggggggcggagcctatggaaaaacgccagcaacgcggcctttttacggttcctggccttttgctggccttttgctcacatgttctttcctgcgttatcccctgattctgtggataaccgtattaccgcctttgagtgagctgataccgctcgccgcagccgaacgaccgagcgcagcgagtcagtgagcgaggaagcggaagagcgcccaatacgcaaaccgcctctccccgcgcgttggccgattcattaatgcagctggcacgacaggtttcccgactggaaagcgggcagtgagcgcaacgcaattaatgtgagttagctcactcattaggcaccccaggctttacactttatgcttccggctcgtatgttgtgtggaattgtgagcggataacaatttcacacaggaaacagctatgaccatgattacgccaagctctagctagaggtcgagtccctccccagcaggcagaagtatgcaaagcatgcatctcaattagtcagcaaccatagtcccgcccctaactccgcccatcccgcccctaactccgcccagttccgcccattctccgccccatggctgactaattttttttatttatgcagaggccgaggccgcctcggcctctgagctattccagaagtagtgaggaggcttttttggaggcctaggcttttgcaaaaagctttgcaaagatggataaagttttaaacagagaggaatctttgcagctaatggaccttctaggtcttgaaaggagtgggaattggctccggtgcccgtcagtgggcagagcgcacatcgcccacagtccccgagaagttggggggaggggtcggcaattgaaccggtgcctagagaaggtggcgcggggtaaactgggaaagtgatgtcgtgtactggctccgcctttttcccgagggtgggggagaaccgtatataagtgcagtagtcgccgtgaacgttctttttcgcaacgggtttgccgccagaacacaggtaagtgccgtgtgtggttcccgcgggcctggcctctttacgggttatggcccttgcgtgccttgaattacttccacctggctgcagtacgtgattcttgatcccgagcttcgggttggaagtgggtgggagagttcgaggccttgcgcttaaggagccccttcgcctcgtgcttgagttgaggcctggcctgggcgctggggccgccgcgtgcgaatctggtggcaccttcgcgcctgtctcgctgctttcgataagtctctagccatttaaaatttttgatgacctgctgcgacgctttttttctggcaagatagtcttgtaaatgcgggccaagatctgcacactggtatttcggtttttggggccgcgggcggcgacggggcccgtgcgtcccagcgcacatgttcggcgaggcggggcctgcgagcgcggccaccgagaatcggacgggggtagtctcaagctggccggcctgctctggtgcctggcctcgcgccgccgtgtatcgccccgccctgggcggcaaggctggcccggtcggcaccagttgcgtgagcggaaagatggccgcttcccggccctgctgcagggagctcaaaatggaggacgcggcgctcgggagagcgggcgggtgagtcacccacacaaaggaaaagggcctttccgtcctcagccgtcgcttcatgtgactccacggagtaccgggcgccgtccaggcacctcgattagttctcgagcttttggagtacgtcgtctttaggttggggggaggggttttatgcgatggagtttccccacactgagtgggtggagactgaagttaggccagcttggcacttgatgtaattctccttggaatttgccctttttgagtttggatcttggttcattctcaagcctcagacagtggttcaaagtttttttcttccatttcaggtgtcgtgaggaattctctagagatccctcgacctcgagatccattgtgcccgggcgccaccatggacatgcgcgtgcccgcccagctgctgggcctgctgctgctgtggttccccggctcgcgatgc

SEQ ID NO: 341 - DNA, 7185 bp, Artificial Sequence
  Description of Artificial Sequence: Synthetic polynucleotide
gcgtcgaccaagggcccatcggtcttccccctggcaccctcctccaagagcacctctgggggcacagcggccctgggctgcctggtcaaggactacttccccgaaccggtgacggtgtcgtggaactcaggcgccctgaccagcggcgtgcacaccttcccggctgtcctacagtcctcaggactctactccctcagcagcgtggtgaccgtgccctccagcagcttgggcacccagacctacatctgcaacgtgaatcacaagcccagcaacaccaaggtggacaagaaagttgagcccaaatcttgtgacaaaactcacacatgcccaccgtgcccagcacctgaagccgcggggggaccgtcagtcttcctcttccccccaaaacccaaggacaccctcatgatctcccggacccctgaggtcacatgcgtggtggtggacgtgagccacgaagaccctgaggtcaagttcaactggtacgtggacggcgtggaggtgcataatgccaagacaaagccgcgggaggagcagtacaacagcacgtaccgtgtggtcagcgtcctcaccgtcctgcaccaggactggctgaatggcaaggagtacaagtgcaaggtctccaacaaagccctcccagcccccatcgagaaaaccatctccaaagccaaagggcagccccgagaaccacaggtgtacaccctgcccccatcccgcgaggagatgaccaagaaccaggtcagcctgacctgcctggtcaaaggcttctatcccagcgacatcgccgtggagtgggagagcaatgggcagccggagaacaactacaagaccacgcctcccgtgctggactccgacggctccttcttcctctacagcaagctcaccgtggacaagagcaggtggcagcaggggaacgtcttctcatgctccgtgatgcatgaggctctgcacaaccactacacgcagaagagcctctccctgtctccgggtaaatgagcggccgctcgaggccggcaaggccggatcccccgacctcgacctctggctaataaaggaaatttattttcattgcaatagtgtgttggaattttttgtgtctctcactcggaaggacatatgggagggcaaatcatttggtcgagatccctcggagatctctagctagaggatcgatccccgccccggacgaactaaacctgactacgacatctctgccccttcttcgcggggcagtgcatgtaatcccttcagttggttggtacaacttgccaactgggccctgttccacatgtgacacggggggggaccaaacacaaaggggttctctgactgtagttgacatccttataaatggatgtgcacatttgccaacactgagtggctttcatcctggagcagactttgcagtctgtggactgcaacacaacattgcctttatgtgtaactcttggctgaagctcttacaccaatgctgggggacatgtacctcccaggggcccaggaagactacgggaggctacaccaacgtcaatcagaggggcctgtgtagctaccgataagcggaccctcaagagggcattagcaatagtgtttataaggcccccttgttaaccctaaacgggtagcatatgcttcccgggtagtagtatatactatccagactaaccctaattcaatagcatatgttacccaacgggaagcatatgctatcgaattagggttagtaaaagggtcctaaggaacagcgatatctcccaccccatgagctgtcacggttttatttacatggggtcaggattccacgagggtagtgaaccattttagtcacaagggcagtggctgaagatcaaggagcgggcagtgaactctcctgaatcttcgcctgcttcttcattctccttcgtttagctaatagaataactgctgagttgtgaacagtaaggtgtatgtgaggtgctcgaaaacaaggtttcaggtgacgcccccagaataaaatttggacggggggttcagtggtggcattgtgctatgacaccaatataaccctcacaaaccccttgggcaataaatactagtgtaggaatgaaacattctgaatatctttaacaatagaaatccatggggtggggacaagccgtaaagactggatgtccatctcacacgaatttatggctatgggcaacacataatcctagtgcaatatgatactggggttattaagatgtgtcccaggcagggaccaagacaggtgaaccatgttgttacactctatttgtaacaaggggaaagagagtggacgccgacagcagcggactccactggttgtctctaacacccccgaaaattaaacggggctccacgccaatggggcccataaacaaagacaagtggccactcttttttttgaaattgtggagtgggggcacgcgtcagcccccacacgccgccctgcggttttggactgtaaaataagggtgtaataacttggctgattgtaaccccgctaaccactgcggtcaaaccacttgcccacaaaaccactaatggcaccccggggaatacctgcataagtaggtgggcgggccaagataggggcgcgattgctgcgatctggaggacaaattacacacacttgcgcctgagcgccaagcacagggttgttggtcctcatattcacgaggtcgctgagagcacggtgggctaatgttgccatgggtagcatatactacccaaatatctggatagcatatgctatcctaatctatatctgggtagcataggctatcctaatctatatctgggtagcatatgctatcctaatctatatctgggtagtatatgctatcctaatttatatctgggtagcataggctatcctaatctatatctgggtagcatatgctatcctaatctatatctgggtagtatatgctatcctaatctgtatccgggtagcatatgctatcctaatagagattagggtagtatatgctatcctaatttatatctgggtagcatatactacccaaatatctggatagcatatgctatcctaatctatatctgggtagcatatgctatcctaatctatatctgggtagcataggctatcctaatctatatctgggtagcatatgctatcctaatctatatctgggtagtatatgctatcctaatttatatctgggtagcataggctatcctaatctatatctgggtagcatatgctatcctaatctatatctgggtagtatatgctatcctaatctgtatccgggtagcatatgctatcctcatgataagctgtcaaacatgagaattttcttgaagacgaaagggcctcgtgatacgcctatttttataggttaatgtcatgataataatggtttcttagacgtcaggtggcacttttcggggaaatgtgcgcggaacccctatttgtttatttttctaaatacattcaaatatgtatccgctcatgagacaataaccctgataaatgcttcaataatattgaaaaaggaagagtatgagtattcaacatttccgtgtcgcccttattcccttttttgcggcattttgccttcctgtttttgctcacccagaaacgctggtgaaagtaaaagatgctgaagatcagttgggtgcacgagtgggttacatcgaactggatctcaacagcggtaagatccttgagagttttcgccccgaagaacgttttccaatgatgagcacttttaaagttctgctatgtggcgcggtattatcccgtgttgacgccgggcaagagcaactcggtcgccgcatacactattctcagaatgacttggttgagtactcaccagtcacagaaaagcatcttacggatggcatgacagtaagagaattatgcagtgctgccataaccatgagtgataacactgcggccaacttacttctgacaacgatcggaggaccgaaggagctaaccgcttttttgcacaacatgggggatcatgtaactcgccttgatcgttgggaaccggagctgaatgaagccataccaaacgacgagcgtgacaccacgatgcctgcagcaatggcaacaacgttgcgcaaactattaactggcgaactacttactctagcttcccggcaacaattaatagactggatggaggcggataaagttgcaggaccacttctgcgctcggcccttccggctggctggtttattgctgataaatctggagccggtgagcgtgggtctcgcggtatcattgcagcactggggccagatggtaagccctcccgtatcgtagttatctacacgacggggagtcaggcaactatggatgaacgaaatagacagatcgctgagataggtgcctcactgattaagcattggtaactgtcagaccaagtttactcatatatactttagattgatttaaaacttcatttttaatttaaaaggatctaggtgaagatcctttttgataatctcatgaccaaaatcccttaacgtgagttttcgttccactgagcgtcagaccccgtagaaaagatcaaaggatcttcttgagatcctttttttctgcgcgtaatctgctgcttgcaaacaaaaaaaccaccgctaccagcggtggtttgtttgccggatcaagagctaccaactctttttccgaaggtaactggcttcagcagagcgcagataccaaatactgttcttctagtgtagccgtagttaggccaccacttcaagaactctgtagcaccgcctacatacctcgctctgctaatcctgttaccagtggctgctgccagtggcgataagtcgtgtcttaccgggttggactcaagacgatagttaccggataaggcgcagcggtcgggctgaacggggggttcgtgcacacagcccagcttggagcgaacgacctacaccgaactgagatacctacagcgtgagctatgagaaagcgccacgcttcccgaagggagaaaggcggacaggtatccggtaagcggcagggtcggaacaggagagcgcacgagggagcttccagggggaaacgcctggtatctttatagtcctgtcgggtttcgccacctctgacttgagcgtcgatttttgtgatgctcgtcaggggggcggagcctatggaaaaacgccagcaacgcggcctttttacggttcctggccttttgctggccttttgctcacatgttctttcctgcgttatcccctgattctgtggataaccgtattaccgcctttgagtgagctgataccgctcgccgcagccgaacgaccgagcgcagcgagtcagtgagcgaggaagcggaagagcgcccaatacgcaaaccgcctctccccgcgcgttggccgattcattaatgcagctggcacgacaggtttcccgactggaaagcgggcagtgagcgcaacgcaattaatgtgagttagctcactcattaggcaccccaggctttacactttatgcttccggctcgtatgttgtgtggaattgtgagcggataacaatttcacacaggaaacagctatgaccatgattacgccaagctctagctagaggtcgagtccctccccagcaggcagaagtatgcaaagcatgcatctcaattagtcagcaaccatagtcccgcccctaactccgcccatcccgcccctaactccgcccagttccgcccattctccgccccatggctgactaattttttttatttatgcagaggccgaggccgcctcggcctctgagctattccagaagtagtgaggaggcttttttggaggcctaggcttttgcaaaaagctttgcaaagatggataaagttttaaacagagaggaatctttgcagctaatggaccttctaggtcttgaaaggagtgggaattggctccggtgcccgtcagtgggcagagcgcacatcgcccacagtccccgagaagttggggggaggggtcggcaattgaaccggtgcctagagaaggtggcgcggggtaaactgggaaagtgatgtcgtgtactggctccgcctttttcccgagggtgggggagaaccgtatataagtgcagtagtcgccgtgaacgttctttttcgcaacgggtttgccgccagaacacaggtaagtgccgtgtgtggttcccgcgggcctggcctctttacgggttatggcccttgcgtgccttgaattacttccacctggctgcagtacgtgattcttgatcccgagcttcgggttggaagtgggtgggagagttcgaggccttgcgcttaaggagccccttcgcctcgtgcttgagttgaggcctggcctgggcgctggggccgccgcgtgcgaatctggtggcaccttcgcgcctgtctcgctgctttcgataagtctctagccatttaaaatttttgatgacctgctgcgacgctttttttctggcaagatagtcttgtaaatgcgggccaagatctgcacactggtatttcggtttttggggccgcgggcggcgacggggcccgtgcgtcccagcgcacatgttcggcgaggcggggcctgcgagcgcggccaccgagaatcggacgggggtagtctcaagctggccggcctgctctggtgcctggcctcgcgccgccgtgtatcgccccgccctgggcggcaaggctggcccggtcggcaccagttgcgtgagcggaaagatggccgcttcccggccctgctgcagggagctcaaaatggaggacgcggcgctcgggagagcgggcgggtgagtcacccacacaaaggaaaagggcctttccgtcctcagccgtcgcttcatgtgactccacggagtaccgggcgccgtccaggcacctcgattagttctcgagcttttggagtacgtcgtctttaggttggggggaggggttttatgcgatggagtttccccacactgagtgggtggagactgaagttaggccagcttggcacttgatgtaattctccttggaatttgccctttttgagtttggatcttggttcattctcaagcctcagacagtggttcaaagtttttttcttccatttcaggtgtcgtgaggaattctctagagatccctcgacctcgagatccattgtgcccgggcgccaccatggagtttgggctgagctggctttttcttgtcgcgattttaaaaggtgtccagtgc
